(19) United States
(12) Patent Application Publication
(10) Pub. No.: US 2004/0265328 A1
(43) Pub. Date: Dec. 30, 2004

(54) Pathogenic and commensal vaccine antigens

(76) Inventors: Andrew Robinson, Salisbury (GB); Andrew Richard Gorringe, Salisbury (GB); Michael John Hudson, Salisbury (GB); Philippa Bracegirdle, Salisbury (GB); David McKay West, Salisbury (GB); Kerry Jane Oliver, Salisbury (GB); John Simon Kroll, London (GB); Paul Richard Langford, London (GB)

Correspondence Address: LESLIE MEYER-LEON, ESQ., IP LEGAL STRATEGIES GROUP P.C., 1480 FALMOUTH ROAD, P.O. BOX 1210, CENTERVILLE, MA, 02632-1210, US

(21) Appl. No.: 10/472,260

(22) PCT Filed: Mar. 22, 2002
(86) PCT No.: PCT/GB02/01399

(30) Foreign Application Priority Data
Mar. 22, 2001 (GB) 0107219.8

(51) Int. Cl. G01N 33/554; G01N 33/569; A61K 48/00; A61K 39/02; C12Q 1/68

(52) U.S. Cl. 424/190.1; 435/7.32; 514/44; 435/6

(57) ABSTRACT

The invention provides methods of screening commensal and pathogenic bacteria for previously unidentified vaccine antigens, based upon identifying polypeptide antigens that bind to sera raised against commensal bacterial proteins. Also provided are vaccine compositions and methods of preparing vaccine compositions comprising the antigens identified by the screening methods. Antigens and uses thereof are also described.

[0001] The present invention relates to compositions and methods for preparing vaccines that stimulate an immune response and are useful for prevention of neisserial infection. In particular, the present invention relates to vaccines that provide broad spectrum protective immunity.

[0002] Meningococcal disease is of particular importance as a worldwide health problem and in many countries the incidence of infection is increasing. Neisseria meningitidis (the meningococcus) is the organism that causes the disease, including meningococcal septicaemia, which is associated with rapid onset and high mortality, with around 22% of cases proving fatal.

[0003] At present, vaccines directed at providing protective immunity against meningococcal disease provide only limited protection because of the many different strains of N. meningitidis. Vaccines based upon the serogroup antigens, the capsular polysaccharides, offer only short lived protection against infection and do not protect against many strains commonly found in North America and Europe. A further drawback of these vaccines is that they provide low levels of protection for children under the age of 2 years, one of the most vulnerable groups that are commonly susceptible to infection. Newer conjugate vaccines now in use in the UK will address some of these problems but will only be effective against the C serogroup of the meningococcus

[0004] Gold et al. (Journal of Infectious Diseases, volume 137, no. 2, February 1978, pages 112-121) have reported that carriage of N. lactamica may assist in the development of natural immunity to N. meningitidis by induction of cross-reactive antibodies. This conclusion was based on the observation of cross-reacting antibodies having complement-dependent bactericidal activity produced in response to N. lactamica infection. However, Cann and Rogers (J. Med. Microbiol., volume 30, 1989, pages 23-30) detected antibodies to common antigens of pathogenic and commensal Neisseria species, but observed also that antibody to the same antigens was present in both bactericidal and non-bactericidal sera. Thus, it was not possible to identify the antigens responsible for cross-reactive bactericidal antibodies.

[0005] Live attenuated vaccines for meningococcal disease have been suggested by Tang et al. (Vaccine 17, 1999, pages 114-117) in which a live, attenuated strain of N. meningitidis could be delivered mucosally. Tang also commented on the use of commensal bacteria to protect against infection by pathogenic bacteria, concluding that the cross-reactive epitopes that induce protection against meningococcal infection have not been defined, and therefore that use of genetically modified strains of N. meningitidis would be preferred.

[0006] Frasch (Meningococcal Disease, Cartwright Ed. (1995); Ch. 10 , pp245-283) comprehensively describes the history and development of meningococcal vaccines. Frasch mentions the development of polysaccharide based vaccines, and also mentions the contemporary developments in the search for alternative vaccine candidates. Frasch deals in extensive sections on vaccines based on capsular components, such as serogroup A and serogroup C polysaccharide—note that, unlike pathogenic Neisseria, the commensal N. lactamica does not possess a capsule. It is known that capsules are often poorly immunogenic, but can be rendered immunogenic using carrier proteins.

[0007] Pollard (Pediatr. Infect. Dis. J. (2000); 19, pp. 333-45) provides an outline of the microbiology of the Gram negative N. meningitidis organism. Pollard identifies no fewer than twelve different serogroups based upon the chemical composition of the polysaccharide capsule that surrounds the outer membrane of the meningococcus—thus vaccines are targeted at these polysaccharide serogroups.

[0008] Cartwright et al (Vaccine 17 (1999), pp2612-2619) describes use of an alternative approach to vaccines, in which a novel vaccine composition comprises the PorA protein, and evokes a good immune response to strains of N. meningitidis. First, a specific surface-exposed protein is identified and OMVs that contain six PorA proteins are prepared.

[0009] Fusco et al (JID (1997); 175, pp. 364-72) describes the production of a group B meningococcal conjugate vaccine that includes purified recombinant PorB porin protein. Fusco et a/ teaches the identification of a surface protein from a pathogenic strain of Neisseria and the inclusion in a vaccine composition.

[0010] Perrin et al (11^{th} International Pathogenic Neisseria Conference, abstract (1998)), page 348 and Infect. Immun. (1999) describe the technique of genomic subtraction—i.e. subtracting the genomic data of commensal bacteria from pathogenic bacteria—which technique has the potential to identify regions of the chromosome likely to be involved in differential virulence of bacterial pathogens and thus likely to be potential vaccine antigens.

[0011] Pizza et al (Science (2000) 287; pp. 1816-1820) describes the whole genome sequencing of a virulent serogroup B strain of N. meningitidis in order to identify potential vaccine candidate antigens. Pizza et al utilises in silico prediction of surface expressed proteins and high through-put screening in order to identify suitable vaccine antigens from pathogenic Neisseria.

[0012] Nevertheless, there remains a need for further and better vaccines against neisserial infection.

[0013] It is desirable to identify immunogenic proteins for incorporation into a vaccine that gives protective immunity to infection from bacteria, especially pathogenic bacteria selected from the Neisseriaceae/Pasteurellaceae family of Gram negative bacteria—for example, N. meningitidis and N. gonorrhoeae. It further is desirable to provide a vaccine that confers protective immunity to infants as well as adults and whose protection is long term. It may also be of advantage to provide a vaccine that protects against sub-clinical infection, i.e. where symptoms of meningococcal or gonococcal infection are not immediately apparent and the infected individual may act as a carrier of the pathogen. It would further be of advantage to protect against all or a wide range of strains of N. meningitidis. It is still further desirable to provide a vaccine against other neisserial infection, notably gonorrhoea.

[0014] It is an object of the present invention to provide antigens, immunogens, compositions containing immunostimulating components, vaccines based thereon, and methods of identifying antigens that meet or at least ameliorate the disadvantages in the art.

[0015] The invention is based upon a new approach to the problems identified, aiming to identify immunogenic components in both commensal and pathogenic organisms of the same family as the pathogen against which the vaccines are to be protective.

[0016] The invention uses combined strategies for identifying antigens that interact with sera raised against commensal bacteria such as commensal Neisseria.

[0017] A first strategy involves the construction of a genomic library from a commensal bacteria, such as N. lactamica. The approach includes expressing fragments of the N. lactamica genome in recombinant phage, so as to create a phage display library where potentially antigenic polypeptides are expressed on the phage surface. Those phages that react with sera raised against a protective N. lactamica extract are isolated. N. lactamica sequences that code for the immunoreactive proteins are thereby identified as potential antigens, suitable for inclusion in vaccines to protect against neisserial infections.

[0018] The N. lactamica immunogenic protein antigens identified by the methods of the invention also serve as a starting point for identifying homologous proteins in other pathogenic bacteria, such as N. meningitidis. Thus, the invention allows for the identification of an entirely new class of vaccine antigens in both the commensal and pathogenic organisms.

[0019] A second strategy involves combining the sera raised against the commensal organism with preparations of antigens from pathogenic Neisseria. The binding between the antibodies in the commensal sera and the pathogen antigens is analysed to identify antigens with previously unknown immunogenic potential.

[0020] Accordingly, a first aspect of the invention lies in a method for identifying an antigen comprising:

[0021] a. obtaining antibodies against a commensal bacteria, or an extract from a commensal bacteria;

[0022] b. contacting the antibodies with one or more polypeptides obtained from either a commensal or a pathogenic bacteria;

[0023] c. determining whether the one or more polypeptides bind to antibodies; and

[0024] d. where a polypeptide binds to an antibody, identifying that polypeptide as an antigen.

[0025] In one embodiment of the invention the method comprises the steps of:

[0026] a. obtaining antibodies against a commensal bacteria or an extract from a commensal bacteria;

[0027] b. contacting the antibodies with one or more polypeptides obtained from an expression library of either a commensal bacteria or a pathogenic bacteria;

[0028] c. determining whether one or more polypeptides bind to antibodies;

[0029] d. where a polypeptide binds to an antibody, identifying that polypeptide as an antigen; and

[0030] e. isolating a clone from the expression library that expresses the antigen.

[0031] Antibodies against commensal bacteria or an extract from commensal bacterial may be contained within sera raised against the bacteria or the extract, and in specific examples below, antibodies are obtained by immunising an animal with commensal proteins. Antibodies may also be obtained from a patient infected with a commensal bacteria, from patient sera, from mucosal secretions or otherwise.

[0032] In a specific embodiment of the invention the isolation step (step (e)) comprises:

[0033] (i) identifying the molecular weight of the polypeptide that binds to the antibody in the sera;

[0034] (ii) correlating the molecular weight with the molecular weights of polypeptides encoded by the genome of the bacteria from which the polypeptide is derived; and

[0035] (iii) determining an identity for the polypeptide and the corresponding nucleic acid that encodes the polypeptide.

[0036] A number of methods are suitable for determining the molecular weight of the polypeptide. Suitable methods of molecular weight determination include mass spectrometry, electrophoresis or chromatography. In a preferred embodiment of the invention, discussed in detail below, the molecular weight of the polypeptide is determined via SELDI mass spectrometry.

[0037] The antigens are obtained from either a commensal organism or a pathogenic organism. Generally, the antigens are polypeptides and it is optional whether the polypeptides are in the form of proteins obtained from an expression library of the relevant organism, or whether they are in the form of a cell extract. For mass spectrometry based embodiments of the present invention, it is preferred that the polypeptides be in the form of a solution or suspension, typically a detergent extract of outer membrane proteins. For the genomic library based embodiments, polypeptides are preferably expressed from a genomic library such as a phage display library. In the latter case, a clone that expresses the polypeptide antigen will be located within a phagemid vector.

[0038] The genomic libraries suitable for use in the methods of the invention can be derived from either commensal or pathogenic genomes. If a pathogenic genome is used then the results of the screening steps will be to identify those polypeptides that have cross reactivity between pathogenic and commensal organisms.

[0039] Commensal micro-organisms are those that can colonize a host organism without causing disease. A number of different commensal bacteria exist. Commensal Neisseria are suitable for use in the invention, and these commensal Neisseria are typically selected from the group consisting of N. lactamica, N. cinerea, N. elongata, N. flavescens, N. polysaccharea, N. sicca, N. perflava and N. subflava. Different species of these commensal organisms are known to colonise the buccal or nasal areas or other mucosal surfaces and hence each species may generate different antigens according to the area of the body it normally colonises.

[0040] Sera raised against commensal organisms have been found to be particularly advantageous as a starting point for the screening methods of the present invention. Unlike sera raised against pathogenic organisms or extracts (e.g. convalescent sera), commensal sera tends to react with a broader range of antigens. Sera raised against pathogenic organisms or extracts of such organisms tends to demonstrate an immunoreactive bias towards certain dominant antigens. For example, sera raised in rabbits against an outer membrane protein preparation from N. meningitidis are biased towards immunodominant antigens such as PorA. As a result, a significant disadvantage of using such sera is that the immunodominant antigens also tend to be the antigens that demonstrate greatest variability across the strain. Hence vaccines derived from sera raised against pathogens such as N. meningitidis tend to have poor cross-reactivity between strains, thus affording lower levels of protection.

[0041] Immunodominant antigen bias is seen to a much lesser extent in sera raised according to the invention against commensals such as N. lactamica, where there are far fewer immunodominant antigens. As a result sera raised against commensal organisms provides an ideal basis for identifying potential vaccine antigens that demonstrate less variability between strains and allow for the production of vaccines that provide broader spectrum, and longer term protection.

[0042] Where the method of the invention is used to first identify a clone/polypeptide from a commensal bacteria, a further method step can optionally be performed comprising the steps of:

[0043] (i) using the nucleic acid sequence of the isolated clone encoding the polypeptide antigen from the commensal bacteria to identify homologous sequences in pathogenic bacteria; and

[0044] (ii) cloning the homologous sequences from the pathogenic bacteria in order to generate the equivalent pathogenic bacterial polypeptide antigen.

[0045] Hence, both the commensal protein antigen and the corresponding pathogen protein antigen can be identified. This allows for further analysis of potential antigenic regions of the homologous polypeptides and also the design of fusion proteins containing pathogenic and commensal sequences with greater vaccine antigenic potential.

[0046] The sera used in the present invention is typically raised in mice or rabbit hosts which are exposed to commensal proteins. The sera are suitably raised against a preparation of outer membrane proteins obtained via standard detergent extraction protocols. Alternatively, whole cells of commensal bacteria can be injected into the host animal. The results of the screening steps can also be biased by choosing particular cell extracts against which the sera is raised. For example, an outer membrane protein extract of a specified molecular weight range could be used in order to generate sera with a particular immunoreactivity profile.

[0047] The sera used in the polypeptide antigen screening steps can also be purified. Typically, the IgG component of the sera is isolated, especially when the mass spectrometry embodiments of the invention are to be used.

[0048] A second aspect of the invention provides a method for identifying an antigen, suitable for inclusion in a vaccine composition, comprising the steps of:

[0049] (a) obtaining sera raised against an outer membrane protein extract of N. lactamica;

[0050] (b) contacting the sera with an N. lactamica phage display library, preferably one comprising the entire N. lactamica genome;

[0051] (c) identifying a phage that tests positive for a binding interaction with the sera, and isolating the positive phage;

[0052] (d) extracting phagemid vector from the positive phage and characterising the cloned N. lactamica genomic sequence located therein; and

[0053] (e) determining the polypeptide encoded by the N. lactamica genomic sequence and identifying the polypeptide as an antigen

[0054] In a preferred embodiment the method of the invention further comprises the step of:

[0055] (f) comparing the sequence of the N. lactamica polypeptide antigen with an N. meningitidis genome sequence in order to identify a N. meningitidis homologue polypeptide antigen.

[0056] A third aspect of the invention provides a method for identifying an antigen, suitable for inclusion in a vaccine composition, comprising the steps of:

[0057] (a) obtaining sera raised against an outer membrane protein extract of N. lactamica;

[0058] (b) isolating the IgG component of the sera;

[0059] (c) binding the isolated IgG to a solid phase;

[0060] (d) contacting the bound IgG with polypeptides obtained from an extract of N. meningitidis cells;

[0061] (e) isolating solid phase-IgG-polypeptide complexes that are formed by the binding of polypeptides to IgG;

[0062] (f) analysing solid phase-IgG-polypeptide complexes via SELDI mass spectrometry;

[0063] (g) correlating molecular weights obtained for the polypeptide from (f) with molecular weights of known and putative polypeptides from the N. meningitidis genome database; and

[0064] (h) identifying as antigens those N. meningitidis polypeptides encoded by genes determined from the correlated molecular weights of (g).

[0065] Further aspects of the invention provide methods of preparing vaccine compositions comprising identifying one or more antigens according to the methods described above, and combining the antigen(s) with a pharmaceutically acceptable carrier. A pharmaceutically acceptable carrier suitable for use in the composition is, for example, aluminium hydroxide although any carrier suitable for oral, intravenous, subcutaneous, intraperitoneal or any other route of administration is suitable.

[0066] The antigens from commensal or pathogenic Neisseria are suitably administered in vaccine compositions, either as whole cells, preparations of outer membrane vesicles (OMVs) from whole cells, or in recombinant form. Where whole cells or OMVs are administered, the invention provides for a method of increasing the antigenic potential of a commensal Neisseria, by introducing or up-regulating the expression of cross-reactive antigens in the whole cell, typically via introduction of gene constructs enabling recombinant production of further antigenic components.

[0067] Known methods of OMV isolation, such as by deoxycholate treatment, are suitable for preparation of compositions of the invention.

[0068] Formulations of the composition of the present invention with conventional carriers or adjuvants provide a composition for treatment of infection by pathogenic bacteria, such as those from the Neisseriaceae/Pasteurellaceae family of Gram negative bacteria.

[0069] Hence, the use of a composition of the invention can result in stimulation or production of protective antibodies in the recipient de novo or if the individual has already been colonised by a commensal or pathogenic bacterium, may result in an enhancement of naturally-existing antibodies.

[0070] Antigens identified by the methods of the present invention may be suitably included in vaccine compositions intended to provide protective immunity to pathogenic bacterial infection. Compositions, comprising an antigen with a pharmaceutically acceptable carrier can include antigens that are polypeptides comprising at least 10 contiguous amino acids encoded by any of the nucleotide sequences identified herein and discussed in more detail below.

[0071] The term “antigen” as used herein refers to both proteinaceous and non-proteinaceous antigens, and when proteinaceous includes proteins, polypeptides, oligopeptides of at least 10 contiguous amino acids, as well as fragments of proteins and polypeptides. It should be noted that antigen fragments can be expressed from part of a nucleic acid sequence that encodes a full length protein, or can be derived from the enzymatic cleavage of a full length polypeptide. In the latter case, an antigen that is a fragment obtained via proteolytic enzyme digestion can retain aspects of tertiary structure essential to retention of antigenicity.

[0072] A “vaccine antigen” is an antigen that when included in a vaccine composition elicits protective immunity to bacterial infection.

[0073] The vaccine compositions of the present invention are particularly suited to vaccination against infection of an animal. The term “infection” as used herein is intended to include the proliferation of a pathogenic organism within and/or on the tissues of a host organism. Such pathogenic organisms typically include bacteria, viruses, fungi and protozoans, although growth of any microbe within and/or on the tissues of an organism are considered to fall within the term “infection”.

[0074] In the process of performing the screening methods of the invention a number of useful vaccine antigens have been identified. The screening methods utilised sera raised against an outer membrane extract from the commensal N. lactamica . A number of N. lactamica and N. meningitidis nucleic acid sequences encoding potential vaccine antigens have been identified. Some of the identified N. meningitidis sequences are known vaccine antigens, although the vast majority of sequences identified encode proteins with previously unknown vaccine potential.

[0075] The present inventors have also constructed a novel N. lactamica genomic library in lambda phage. The N. lactamica nucleic acid sequences identified via the methods of the invention thus represent novel gene sequences that when expressed provide novel polypeptides, previously uncharacterised and not before isolated from N. lactamica. These polypeptides show significant utility as vaccine antigens.

[0076] Accordingly, further aspects of the invention provide for polypeptides encoded by all or a part of a N. lactamica nucleic acid sequence selected from the group consisting of SEQ. ID NOS: 1; 5; 11; 15; 19; 23; 27; 31; 35; 39; 43; 47; 51; 55; 59; 63; 67; 71; 75; 79; 83; 87; 91; 95; and 99. Polypeptide antigens derived from the polypeptide expressed from these nucleic acid sequences can be suitably included in vaccine compositions that protect against meningococcal disease.

[0077] The invention also provides for polypeptide antigen expressed from a nucleic acid sequence having at least 80% homology, preferably at least 80% similarity, or at least 90% homology, preferably at least 90% similarity with a nucleic acid sequence selected from the N. lactamica or N. meningitidis sequences of the invention.

[0078] A number of sequence comparison algorithms are known in the art suitable for determining homology between nucleic acid (or polypeptide) sequences. These algorithms are suitable for both sequence comparison and analysis of nucleic and amino acid sequences. Software and systems utilising algorithms such as BLAST, FASTA, Tepitope™, PepTool™ and EpiMer ™ are suitable for use in the methods of the present invention. In use, the skilled person is able to readily identify areas of homology between two or more sequences. Further, these algorithms facilitate sequence analysis to the extent that particular regions or localised domains of high sequence identity can be pinpointed and thus potential sub-domain antigens can be identified. The sequence analysis thereby enables the identification of localised antigenic regions that can be included in vaccine compositions of the invention. The method of the invention is particularly useful where inclusion of the whole protein encompassing a desired antigenic region would be deleterious, possibly due to auto-immune responses that might be caused in a host organism, or due to the presence of masking domains that would hide the antigenic region from the host immune system.

[0079] In still further aspects of the present invention an isolated N. lactamica nucleic acid molecule is provided, selected from the group consisting of SEQ. ID NOS: 1; 5; 11; 15; 19; 23; 27; 31; 35; 39; 43; 47; 51; 55; 59; 63; 67; 71; 75; 79; 83; 87; 91; 95; and 99. Also provided are vectors comprising the isolated nucleic acid molecules.

[0080] The corresponding polypeptides translated from the N. lactamica sequences of the invention are also provided herein in SEQ. ID NOS: 2; 6-8; 12; 16; 20; 24; 28; 32; 36; 40; 44; 48; 52; 56; 60; 64; 68; 72; 76; 80; 84; 88; 92 and 100. These polypeptides and parts thereof, are useful as vaccine antigens.

[0081] The terms “a part of” or “a fragment of” as used herein is intended to refer to parts of the polypeptide antigen that demonstrate an antigenicity that is equivalent to that of the entire protein itself. In essence, an antigenic motif or domain that consists of, for example, only 20% of the whole protein can have an equivalent value as a vaccine antigen as the full length protein. A part or fragment of a full length polypeptide antigen will typically comprise around 10 or more contiguous amino acid residues of that full length antigen, although in certain cases fewer than 10 residues might be sufficient to generate some protective immunity.

[0082] As mentioned previously the screening methods of the present invention have also succeeded in identifying a number of N. meningitidis proteins as candidate vaccine antigens. The nucleic acid sequences that encode these polypeptide antigens are shown in SEQ. ID NOS: 3; 9; 13; 17; 21; 25; 29; 33; 37; 41; 45; 49; 53; 57; 61; 65; 69; 73; 77; 81; 85; 89; 93; 101; 103; 105; 107; 109; 111; 113; 115; 117; 119; 121; 123; 125; 127; 129; 131; 133; 135; 137; 139; 141; 145; 147; 149; 151; 153; 155; 157; 159; 161; 163; 165; 167; 169; 171; 173; 175; 177; 179; 181; 183; 185; 187; 189; 191; 193; 195; and 198. The corresponding polypeptide translations are provided in SEQ. ID NOS: 4; 10; 14; 18; 22; 26; 30; 34; 38; 42; 46; 50; 54; 58; 62; 66; 70; 74; 78; 82; 86; 90; 94; 102; 104; 106; 108; 110; 112; 114; 116; 118; 120; 122; 124; 126; 128; 130; 132; 134; 136; 138; 140; 142-144; 146; 148; 150; 152; 154; 156; 158; 160; 162; 164; 166; 168; 170; 172; 174; 176; 178; 180; 182; 184; 186; 188; 190; 192; 194; 196-197; and 199.

[0083] Hence, further aspects of the invention provide for vaccine compositions comprising the newly identified N. meningitidis polypeptide antigens or parts thereof.

[0084] Yet further aspects of the invention provide for uses of the polypeptides expressed from the nucleic acid sequences, or the specified polypeptide sequences themselves, as vaccine antigens. Further uses include the use of the polypeptides expressed from the nucleic acid sequences, or the specified polypeptide sequences themselves in the manufacture of medicaments for vaccination against meningococcal disease.

[0085] Another aspect of the invention provides for a method of preparing a composition for vaccination against infection by pathogenic bacteria, comprising:

[0086] (1) obtaining a first antigen from a commensal Neisseria;

[0087] (2) (a) comparing the amino acid sequence of the first antigen with the amino acid sequence of a second antigen from a pathogenic bacteria or, (b) comparing the sequence of a nucleic acid which codes for the first antigen with the sequence of a nucleic acid that codes for the second antigen; and, if the first antigen is homologous to the second antigen or if the nucleic acid sequence for the first antigen is homologous to the nucleic acid sequence for the second antigen, then

[0088] (3) preparing a composition for vaccination against bacterial infection comprising the first antigen

[0089] The antigen from a commensal Neisseria or nucleic acid sequence from a commensal Neisseria can be compared with a library of antigens or nucleotide sequences from a pathogenic bacteria, to determine whether there is a corresponding homologous antigen from the pathogenic bacteria.

[0090] The terms “homologous” and “homology” and related terms as used herein mean that the immune response to the commensal antigen cross-reacts with a pathogen. Such homology is present if an immune response to the commensal antigen is protective against challenge by a pathogen. Such homology is also present if there is sequence similarity, e.g. sequence homology between the respective commensal and pathogen sequences of at least 50%, preferably at least 70%, more preferably at least 80%. The sequences are either amino acid sequences or nucleic acid sequences that encode amino acid sequences. The level of similarity can be either the level of identity between the entirety of the sequences, the level of identity between a portion of the sequences or the similarity in antigenic equivalence. It is apparent that the level of identity between the sequences is a function of the primary structure of the amino acid sequences, whereas the level of antigenic equivalence/homology is a function of the secondary and tertiary structure of the amino acid sequences.

[0091] In determining the level of homology between the amino acid or nucleic acid sequences for the antigenic component in the commensal Neisseria, and that of the antigenic component in the pathogenic bacteria, the level of homology is determined with respect to significant antigenic epitope, domains or subunits and is not limited to an overall level of homology.

[0092] For example, if there is a high level of homology to the sequence of a particular subunit of a membrane associated surface protein, but low levels of homology to the associated membrane spanning domain and intracellular regions, then the level of effective antigenic homology will still be considered high and useful in the invention even though the overall level of sequence homology is low.

[0093] It is important to note that the antigenic components of the compositions of the invention are preferably amino acid sequences that are immuno-apparent, or “visible”, to the immune system of a host organism. Thus, a 50% homology between the immuno-apparent regions of a protein may not correspond to a high overall homology between the sequences of the commensal and pathogenic versions. Indeed, identifying specific domains of high sequence homology between antigenic components from commensal and pathogenic species is sufficient to identify an antigen from a commensal species that is suitably included in a vaccine composition that provides protective immunity to infection from the pathogenic species.

[0094] Ideally there is a high level of homology, in excess of 90 percent, though above 50 percent is usually sufficient, preferably above 70 percent.

[0095] The method of the invention comprises identifying an antigen from a commensal Neisseria that is homologous in amino acid sequence to a sequence from a pathogenic bacteria. Preferably the pathogenic bacteria is a Gram negative bacteria, more preferably a pathogenic Neisseria, for example N. meningitidis or N. gonorrhoeae. Alternatively, the bacteria is selected from pathogenic members of the Neisseriaceae (includes Neisseria, Branhamella, Moraxella, Acinetobacter, Kingella) and the Pasteurellaceae (Pasteurella, Haemophilus, Actinobacillus) families of Gram negative bacteria. These micro-organisms are characterised by the ability to inhabit mucosal surfaces in a host organism and to cause infections such as otitis media (middle ear infection). Due to the fact that they tend to inhabit a similar environmental niche and are often co-exist on the same mucosal surface, it can be difficult to discriminate clinically between the pathogenic members of this subgroup of bacteria.

[0096] Commensal micro-organisms are those that can colonize a host organism without causing disease. A number of different commensal Neisseria are suitable for use in the invention, and these commensal Neisseria may be selected from the group consisting of N. lactamica, N. cinerea, N. elongata, N. flavescens, N. polysaccharea, N. sicca, N. perflava and N. subflava. Different species of these commensal organisms are known to colonise the buccal or nasal areas or other mucosal surfaces and hence each species may be administered according to the known area of the body it normally colonises. Hence also, use of a composition of the invention may result in stimulation of production of protective antibodies de novo or if the individual has already been colonised to a certain extent may result in an enhancement of naturally-existing antibodies.

[0097] The Neisseria meningitidis (serogroups A and B), Haemophilus influenzae and Pasteurella multocida (PM70) genomes have been sequenced and published. The genomic data is available from the Sanger Institute (Cambridge, UK) or on the internet (www.sanger.ac.uk, www.ebi.ac.uk/genomes and www.tigr.org) and the number of fully sequenced bacterial genomes available is anticipated to increase dramatically in the future. Hence it is possible for the neisserial commensal nucleic acid sequence to be compared with a genome sequence of a plurality of pathogenic bacteria.

[0098] The antigens from a commensal Neisseria identified in the method of the present invention need not be limited to surface visible antigens. Indeed, it is a surprising observation that a number cytoplasmic and endosomal proteins previously thought not to be visible to the host immune system do have antigenic potential. Thus, it is of considerable advantage that the present invention allows for the inclusion of a broader range of antigenic components in vaccine compositions than was previously thought possible. As apparent from the literature discussed in the background section above, a large number of candidate antigens have been identified in pathogenic Neisseria and have been or are being tested for their value in vaccines. A further optional screening step in the invention is to retain antigen from a commensal Neisseria that corresponds to antigens already identified from studies on pathogens as having actual or potential value.

[0099] Candidate antigens identified in commensal Neisseria by the method of the invention are evaluated in a number of ways. Some candidate antigens have sequence homologous to conserved sequence in a plurality of different pathogenic species and thus demonstrate the potential for broad spectrum protection. Other candidate antigens demonstrate a high level of homology to a sequence in a single pathogenic species, and thus demonstrate the potential for strong antigenic activity with respect to this single species of pathogen.

[0100] Candidate antigens are also evaluated on the basis of their suitability for inclusion in vaccine compositions of the invention. Some candidate antigens are more readily incorporated in outer membrane vesicles (e.g. membrane associated proteins) than others and are therefore selected for this particular mode of delivery.

[0101] In one particular method, a protein is identified in the commensal Neisseria. This protein is then screened for reactivity with an antibody preparation which is known to bind to the commensal. For example, the antibody preparation can be prepared using an extract of commensal membrane. If the screen is positive, that is to say if the protein is recognized by the antibody preparation, then it is identified as an antigen. This first screen thus confirms that the protein is antigenic and is likely to be expressed on the surface of the commensal.

[0102] A second screening step is to investigate if there is a corresponding antigenic sequence in a pathogenic Neisseria, and this is suitably done as described above. If this second screen is positive then third and further screens, to identify most preferred vaccine candidates include selection by size, selection by frequency of existence of a corresponding antigen in all pathogenic species.

[0103] Thus in an example of the invention in use, a detergent extract of a commensal Neisseria (e.g. N. lactamica) is used to vaccinate mice. Mice are subjected to challenge from a pathogenic member of the Neisseriaceae/Pasteurellaceae family (e.g. N. meningitidis, Moraxella catarrhalis, Pasteurella multocida or Haemophilus influenzae). Convalescent sera is obtained from mice that survive the challenge, and is used to screen an expression library from the commensal Neisseria to identify candidate antigens. The nucleotide and amino acid sequence for the identified candidate antigens can then be determined and compared by sequence similarity and other analysis for homology to sequences from the pathogenic organism. Candidate antigens are selected for their suitability and included in vaccine compositions.

[0104] In an example of the invention in use antigens from commensal Neisseria can be evaluated for their suitability for inclusion in a vaccine, by the following steps of:—

[0105] obtaining an amino acid sequence for an antigen from a commensal

[0106] Neisseria, or obtaining a nucleotide sequence encoding the antigen;

[0107] comparing the sequence obtained with a corresponding sequence from a pathogenic bacteria; and

[0108] identifying an antigen in which the total sequence homology exceeds 50%.

[0109] A composition for vaccination against neisserial infection is then prepared by identifying an antigen according to this method and incorporating said antigen into the composition.

[0110] This latter aspect of the present invention thus represents a departure from previously held wisdom in the area of vaccine preparation. According to the invention, vaccine antigens are identified starting with an antigen expressed in a commensal species. This antigen is suitably tested to determine whether it is expressed on the surface of the commensal and if so it is investigated whether a corresponding protein, that is to say a protein which is at least 50% homologous, is present in the pathogen. When the corresponding protein is identified in the pathogen, the vaccine is then based upon either the commensal protein, or an immunogenic fragment thereof, or from the pathogenic species. The invention thus differs substantially from prior approaches to obtaining vaccines in which subtraction work was used to identify antigens seen only in the pathogen.

[0111] An advantage of the current approach is that handling the commensal organism carries fewer risks during preparation of the vaccines. A further advantage is that antigens in commensals tend to demonstrate fewer intra-species variations. Thus, the commensal-derived antigens can offer a broader spectrum of immunity, albeit in some circumstances of a level of protection that is lower against certain pathogenic strains than an antigen derived from that particular pathogenic species. A benefit is that the commensal-derived antigen generally possesses at least a low level of protection against a wider range of strains.

[0112] According to the invention, therefore, a trade-off is accepted between potency against individual strains in favour of cross-reactivity against many strains. In practice, vaccination programs are crude in that all individuals in, say, a given population such as within one country tend to be administered the same vaccine, regardless of whether in particular parts of the country one pathogenic strain in more prevalent than another. Cross-reactivity of antigenic component as provided in the instant invention ensures at least a base-line of protection for the vast majority of those vaccinated rather than high protection in some and the risk of absence of protection in others.

[0113] In examples of the invention described below in more detail, the antigen is a fragment of a commensal Neisseria protein. Antibodies raised against a commensal Neisseria detergent extract are used to identify the antigen. This antigen, which as mentioned is a fragment of an intact commensal protein, is used to identify a corresponding protein having a minimum level of homology in the pathogenic organism. The existence of a pathogenic partner to the antigen from a commensal Neisseria marks both the commensal antigen and the pathogenic antigen as a vaccine candidates. As mentioned previously, due to the lack of Immunodominant antigens in sera raised against commensal proteins, there exists the real opportunity to identify novel pathogenic antigens also.

[0114] In an example described in more detail below, a genomic library was prepared from Nasseiria lactamica. Genomic DNA was partially digested by Mbol. Digested DNA of between 1 and 4 kb was ligated into the ZAP Express vector (Stratagene) and packaged using the Gigapack III Gold packaging extract (Stratagene). Ligated and packaged DNA was plated and plaque lifts were performed. Plaques were screened using rabbit serum raised against an N. lactamica detergent extract previously identified as protective against meningococcal challenge in an experimental meningococcal infection model. Positive plaques, reacting with this N. lactamica serum were picked and purified. After ensuring that the inserts were of different sizes by PCR, the pBK-CMV phagemid vector was excised from the ZAP Express vector for each clone. The phagemids were purified and inserts were then sequenced using T3 and T7 primers. The sequences produced were compared with the meningococcal genome and the homologous meningococcal proteins are listed below. NMA numbers are the gene number assigned in the meningococcal serogroup A genome. NMB numbers are those assigned in the meningococcal serogroup B genome

[0115] The invention also provides for a quality control method of determining if a candidate antigen is present in a composition under test by:

[0116] (i) identifying the candidate antigen in the composition, or

[0117] (ii) identifying an immune response in a host animal exposed to the composition appropriate to the presence of the antigen in said composition.

[0118] Typically, a preparation to be evaluated comprises a number of different antigenic components as is the case for OMV-based vaccines. The method of the invention allows for the screening of these preparations to assess whether the candidate antigen(s) is present and present to an acceptable degree.

[0119] Recombinant candidate antigen is also utilised for quality control assays routinely in testing of sera from animals vaccinated with a composition comprising the antigen. If the sera from these animals reacts with the candidate antigen sufficiently then it is considered that the composition contains adequate amounts of the candidate antigen. If there is an insufficient reaction then the composition is considered to be defective. The reaction between sera and recombinant antigen is suitably mediated via a number of techniques commonly known in the art, for example, recombinant antigen can be placed on microparticles such that in the presence of sera containing the antibody to the antigen an agglutination reaction occurs. This assay can also be adapted to test the vaccine composition itself by replacing the recombinant antigen with the vaccine composition in the aforementioned steps.

[0120] A defective vaccine can be discarded if it is found not to contain a desired candidate antigen, or is found in protection tests not to evoke a desired immune response.

[0121] The invention is now described in more detail with references to the following examples.

### EXAMPLES

### Example 1

### Genomic Screen

[0122] 1. Preparation of N. lactamica Genomic Phage Display Library

[0123] 1.1. Preparation of N. lactamica Genomic DNA

[0124] 100 ml MHB (Oxoid) was inoculated with a loopful of plate grown N. lactamica , strain Y92-1009 and incubated with shaking at 37° C. for 18 h. The culture was centrifuged at 4000 g and the pellet resuspended in 9.5 ml TE buffer (10 mM Tris, 1 mM ethylenediaminetetraacetic acid (EDTA), pH 8.0). 0.5 ml 10% (w/v) sodium dodecyl sulphate (SDS) and 50 ml 20 mg/ml proteinase K (Sigma) was added to the suspension and this was incubated for 1 hour at 37° C. 1.8 ml of 5 M NaCl and 1.5 ml 10% cetyltrimethylammoniumbromide (CTAB) in 0.7 M NaCl was added and the solution incubated at 65° C. for 20 min. DNA was extracted form the lysed cells by the addition of an equal volume of chloroform:isoamyl alcohol (Sigma). The solution was centrifuged at 6000 g for 10 min and 0.6 of the total volume of isopropanol was added to precipitate the DNA. Precipitated DNA was washed in 1 ml 70% (v/v) ethanol and recovered by centrifugation at 10000 g for 5 min, the supernatant discarded and the pellet resuspended in 4 ml TE buffer. 1.075 g/ml CsCI (Sigma) and 50 ml of 10 mg/ml ethidium bromide (Sigma) were added and the solution was centrifuged in quick-seal centrifuge tubes at 250000 g for 18 h at 15° C. The CsCI gradient was visualised under longwave UV and the band removed. Ethidium bromide was removed by sequential extractions with water saturated butanol. CsCl was removed by precipitation of the DNA with ethanol at 4° C. for 15 min followed by centrifugation at 10000 g for 15 min. The pellet was resuspended in TE buffer for long term storage.

[0125] 1.2. Preparation of Partially Digested Genomic DNA

[0126] 10 mg genomic DNA was digested as follows. 10 mg genomic DNA, 1 mg BSA, 10 ml NEBuffer 3 (New England Biolabs), 6 ml Mbol (New England Biolabs) and 63 ml molecular biology grade water (Sigma) were incubated at 37° C. for 2 h. The products were analysed on a 0.8% (w/v) low melting point agarose gel (Sigma). Bands of between 1 and 4 kb were located using longwave UV and cut from the gel. Digested DNA was removed from the gel using the QlAquick Gel Extraction Kit (Qiagen), following the protocol supplied. Extracted DNA was stored in TE buffer.

[0127] 1.3. Ligation

[0128] To ligate partially digested DNA to the ZAP Express vector (Stratagene) a ligation reaction was set up as follows. 1 mg vector, 0.4 mg digested DNA, 0.5 ml 10×T4 DNA ligase buffer (New England Biolabs), 2.7 ml molecular biology grade water and 10U T4 DNA ligase (New England Biolabs) were incubated at 4° C. for 18 h.

[0129] 1.4. Packaging

[0130] The phage particles were packaged using the Gigapack III Gold packaging extract (Stratagene). 3 ml ligation reaction was added to the packaging extract and mixed well. The mixture was centrifuged at 6000 g for 5 seconds and incubated at room temperature for 2 h. 500 ml SM buffer (5.8 g NaCl, 2 g MgSO₄.7H₂O, 50 ml 1 M Tris (pH 7.5), 5 ml 2% (w/v) gelatine diluted to 1 L with H₂O) and 20 ml chloroform were added to the mixture, the contents mixed, centrifuged briefly and the supernatant stored at 4° C.

[0131] 1.5. Plating Packaged Ligation Product

[0132] E. coli, strain XL1 Blue MRF′, was grown overnight on an LB agar plate at 37° C. for 18 h. 10 ml LB broth supplemented with 10 mM MgSO₄ and 0.2% (w/v) maltose was inoculated with a single colony and incubated with shaking at 37° C. for 6 h. The cells were centrifuged at 1000 g for 10 minutes, the supernatant removed and the pellet resuspended in 10 mM MgSO₄. The OD₆₀₀ was adjusted to 0.5. 2 ml of the final packaged reaction was mixed with 200 ml XL1 Blue MRF′ and incubated with gentle shaking at 37° C. for 15 min. 3 ml NZY top agar, 15 ml 0.5 M isopropyl-b-D-thiogalactopyranoside (IPTG) and 12.5 mg 5-bromo-4-chloro-3-indolyl-b-D-galactopyranoside (X-gal) (Sigma) were added and the mixture poured immediately onto NZY agar plates and incubated at 30° C. for 18 h. 20 plates were prepared to cover the entire N. lactamica genome. Bacteriophage were recovered by overlaying the plates with 8-10 ml SM buffer and incubating with gentle shaking at 4° C. for 18 h. 5% (v/v) chloroform was added to the bacteriophage suspension and the cell debris removed by centrifugation at 500 g for 10 min. Chloroform (0.3% v/v) was added to the supernatant and the library was stored at 4° C.

[0133] 2. Analysis of Genomic Library

[0134] 2.1. Plaque Lifts

[0135] 3 ml of the bacteriophage library was plated as described above on to enough NZY agar plates to cover the genome. After incubation at 30° C. for 18 h, IPTG soaked nitrocellulose membranes (Amersham Pharmacia Biotech) were applied to the plates and incubated at 30° C. for a further 18 h. The membranes were carefully removed and blocked with phosphate buffered saline (PBS) containing 0.05% (v/v) Tween-20 and 1% (w/v) milk powder (Marvel) for 1 h. The membranes were washed with PBS containing 0.05% Tween 20 (PBS-T) and then incubated with rabbit serum raised against N. lactamica detergent extracted OMPs diluted with PBS-T for 1 hour. After washing as before, the membranes were incubated with anti-rabbit horseradish peroxidase (HRP) (ICN) for 1 hour, washed with PBS and developed with 0.5 mg/ml 4-chloro-1-naphthol (Sigma) to identify cross reactive phage.

[0136] 2.2. Plaque Purification

[0137] A plug of agar containing the positive plaque was removed from the plates for each plaque identified. The plugs were placed in 1 ml SM buffer containing 0.5% (v/v) chloroform and incubated at 4° C. for 18 h. 10 ml phage suspension was plated, lifted and positives identified as previously described. This was carried out for each positive and repeated until the suspensions were pure. Long term storage of phage was at 4° C. in SM buffer.

[0138] 2.3. Polymerase Chain Reaction (PCR)

[0139] Positive phage were plated as previously described. One plaque was picked for each positive, pipetted into 500 ml molecular biology grade water, vortexed and incubated at 4° C. for 18 h to release phage particles from the agar. This was used as the template for PCR. The following reaction mixture was used to amplify N. lactamica inserts from positive phage; 1 ml T3 primer (Life Technologies), 1 ml T7 primer (Life Technologies), 1 ml template, 2.5 U Taq DNA polymerase (Roche), 5 ml 10×PCR buffer (Roche), 1 ml of 10 mM dNTP (Roche) and 40.5 ml were mixed on ice in a 200 ml PCR tube (Anachem-Scotlab) for each template. The reactions were heated to 94° C. for 3 min. Thermal cycling was repeated 35 times as follows; 94° C. for 30 seconds, 52° C. for 30 seconds, 72° C. for 2.5 min. The reactions were finally incubated at 72° C. for 10 min.

[0140] 2.4. Phagemid Excision

[0141] Positive phage were plated as previously described. Individual phage stocks were prepared from the transfer of one plaque to 500 ml SM buffer containing 20 ml chloroform, which was then vortexed and incubated at 4° C. for 18 h. E. coli, strain XL1 Blue MRF′ was grown in 10 ml LB broth supplemented with 0.2% (w/v) maltose and 10 mM MgSO₄ at 30° C. for 18 h. The cells were centrifuged at 1000 g for 15 min and the pellet resupended to an OD₆₀₀ of 1 in 10 mM MgSO₄. 200 ml resupended XL1 Blue MRF′ was combined with 250 ml phage stock and 1 ml ExAssist helper phage (Stratagene) and incubated at 37° C. for 15 min. 3 ml NZY broth was added to each mixture and these were further incubated with gentle shaking at 37° C. for 2.5 h and finally heated to 70° C. for 20 min and centrifuged at 1000 g for 15 min. The supernatant, consisting of excised pBK-CMV phagemid vector, was decanted and stored at 4° C. This was repeated for each phage stock.

[0142] 2.5. Plating Excised Phagemid

[0143] E. coli, strain XLOLR, was grown in 10 ml NZY broth at 30° C. for 18 h, centrifuged at 1000 g for 15 min and the pellet resuspended in 10 mM MgSO₄ to and OD₆₀₀ of 1. 100 ml of the phagemid supernatant was mixed with 200 ml resuspended cells and incubated at 37° C. for 15 min. 300 ml NZY broth was added and the mixture further incubated at 37° C. for 45 min. 200 ml of the cell mixture was plated on LB agar supplemented with 50 mg/ml kanamycin (Sigma) and incubated at 37° C. for 18 h.

[0144] 2.6. Phagemid Purification

[0145] Phagemids were purified using Wizard Plus Minipreps (Promega) following protocol supplied.

[0146] 2.7. Sequencing

[0147] The purified phagemid stocks were then sequenced using T3 and T7 primers. The sequences are shown followed by their translation products and the corresponding N. meningitidis homologues (nucleic acid and protein) in SEQ ID NOS: 1-102.

[0148] The N. lactamica proteins deduced from the genomic screen and thus identified as candidate vaccine antigens are shown in Table 1, below.

TABLE 1
N. lactamica genomic library: proteins deduced from sequences

| | | | Predicted |
|---|---|---|---|
| | | Swissprot | protein |
| SEQ ID | | Homologue | molecular |
| NO | N. meningitis homologue | code* | weight |
| 1 | Putative integral membrane protein | Q9JWY0 | 23.0 kDa |
| 5 | Putative ribonuclease (VacB) | Q9JUD1 | 60.4 kDa |
| 11 | Dihydrolipoamide acetyltransferase | Q9JU07 | |
| | (pyruvate dehydrogenase component) | | |
| 15 | Hypothetical protein | Q9JX69 | 11.6 kDa |
| 19 | Hypothetical protein | Q9JX70 | 7.0 kDa |
| 23 | Hypothetical protein | Q9JQT0 | 19.8 kDa |
| 27 | Hypothetical protein | Q9JX71 | |
| 31 | Hypothetical protein | Q9JYD0 | 38.3 kDa |
| 35 | Putative integral membrane protein | Q9JTB4 | 41.0 kDa |
| 39 | Pyruvate dehygrogenase subunit C | O70056 | |
| | (pyruvate dehydrogenase E1 | (Q9JU08) | |
| | component) | | |
| 43 | Dihydrolipoamide acetyltransferase | Q9JU07 | |
| | (pyruvate dehydrogenase component) | | |
| 47 | Alanyl - tRNA synthetase | Q9JYG6 | 100.4 kDa |
| 51 | Na+ translocating NADH quinone | Q9JVQ0 | 33.2 kDa |
| | reductase subunit C | | |
| 55 | Na+ translocating NADH quinone | Q9JVQ1 | 16.7 kDa |
| | reductase subunit D | | |
| 59 | Putative hydrolase | Q9JWG2 | 19.4 kDa |
| 63 | Hemagglutinin/hemolysin related | Q9JY30 | 119.1 kDa |
| | protein | | |
| 67 | Nitrogen assimilation regulatory | Q9K1K2 | 41.3 kDa |
| | protein (NtrX) | | |
| 71 | DNA processing chain A | Q9K1K1 | 50.8 kDa |
| 75 | Hypothetical protein | Q9JR28 | |
| 79 | BirA protein/Bvg accessory factor | Q9JXF1 | |
| 83 | Putative periplasmic protein | Q9JXF2 | |
| 87 | Cytochrome C precursor | Q9JWG4 | 16.7 kDa |
| 91 | Hypothetical protein | Q9JXH2 | |
| 95 | HemK protein | Q9JWH6 | 29.5 kDa |
| 99 | Probable ATP dependent helicase | Q9K181 | 86.1 kDa |
| | DinG | | |

*homologue codes can be used to retrieve protein information at http://www.expasy.org

### Example 2

### Mass Spectrometry Screen

[0149] Surface Enhanced Laser Desorption Ionisation Methods

[0150] 1 Production of Rabbit Sera

[0151] Rabbits were immunised s.c with 60 μg N. lactamica protein pools (described previously) in 2 ml of 25% (v/v) alhydrogel administered over four sites. Primary vaccinations were administered to rabbits on day 1 of the experiment. The vaccinations were boosted on days 21 and 28 and challenge was on day 35 of the experiment.

[0152] 1.1 Purification of IgG from Serum

[0153] A Protein G Sepharose Fast Flow gel column was packed as described by the manufacturer. The serum sample was diluted 1:4 in 20 mM sodium phosphate buffer, pH7.0 (buffer A) and the column equilibrated with the same buffer. The diluted sample was loaded onto the column and washed through the column with buffer A at a rate of 1 ml min⁻¹. The eluate was collected as 5 ml fractions. After 48 ml had washed through the column the buffer was changed for 0.1 M glycine, pH2.8 (buffer B). This was eluted through the column at the same rate as previously stripping the column of bound IgG. 22 ml of buffer B was washed through the column and the sample was collected in 2 ml fractions into 0.5 ml Tris, pH 9.0 to neutralise the pH.

[0154] 2 Preparation of Detergent Extracted OMPs

[0155] A 500 ml broth culture of N. meningitidis, strain MC58 cap⁻, was centrifuged at 200 g for 60 min. The supernatant was discarded and the pellet washed with 100 ml PBS by centrifugation at 200 g for 30 min. The supernatant was again discarded and 2 ml PBS containing 0.3% (v/v) elugent was added for each gram of pellet. The pellet was homogenised and incubated at 37° C. with shaking for 20 min. The solution was centrifuged at 14,000 rpm for 10 min and the pellet discarded. To the supernatant 10 mM (w/v) EDTA, 0.5% (w/v) N-lauryl-sarcosine (Sigma) and 0.1% (v/v) of a 10% (w/v) PMSF solution was added. The supernatant containing extracted OMPs was stored at −20° C.

[0156] 2.1 Separation of Detergent Extract by Preparative Electrophoresis

[0157] Preparative electrophoresis was carried out using the model 419 Prep-Cell (BioRad) as described in the protocol supplied. The gels used were non-denaturing and a gel consisting of 7% (v/v) protogel was used for separation of OMPs of <100 kDa.

[0158] 3 Coating of Dynabeads with N. lactamica IgG and N. meningitidis Protein Pools

[0159] 250μl tosylactivated dynabeads were placed into a 1.5 ml tube and the beads retained by magnet. The solution was removed and the beads were resuspended with mixing for 2 min in 250 μl 0.1 M borate buffer (pH 9.5). This was repeated twice. The buffer was then removed and the beads resuspended in 500 μl containing 30 μIgG. The beads were incubated for 18 hours at 37° C. with slow tilt rotation. The beads were blocked by resuspending them in 500 μl PBS containing 0.1% (w/v) BSA. This was repeated twice. The solution was removed and replaced with 0.2M Tris (pH8.5) containing 0.1% (w/v) BSA and incubated for 4 hours at 37° C. with slow tilt rotation. The solution was removed and the beads resuspended in 500 μl PBS containing 0.1% BSA. The beads were washed in 500 μl PBS containing 0.5% (v/v) Triton X100, resuspended in 500 μl PBS containing 0.1% BSA and finally resuspended in 100 μl PBS containing 0.1% BSA. 10 μl of the IgG coated bead solution was incubated with 50 μl N. meningitidis OMP pool for 4 hours with slow tilt rotation. The supernatant was removed and the beads washed with sterile water for 5 min in triplicate. Washed beads were resuspended in 10 μl sterile water for analysis. Beads coated with normal rabbit IgG and incubated with N. meningitidis OMPs were used as controls.

[0160] 4 Analysis of Beads

[0161] 2 μl beads were placed onto 1 μl 50% (v/v) acetonitrile on spot of H4 chips. These were left to dry and covered with 0.7 μl of a 10 mg/ml solution of sinapinic acid in 0.25% (v/v) trifluoric acid and 50% (v/v) acetonitile. ProteinChips (Ciphergen™) were read using the Ciphergen SELDI apparatus and accurate molecular weights of the proteins bound by the rabbit IgG were determined Calibration of the SELDI apparatus was carried out as described in the Ciphergen™ handbook.

[0162] The putative meningococcal proteins cross-reacting with IgG from N. lactamica antisera as identified in the screen were correlated to the N. meningitidis Group B genome database using ExPasy Tagident software. All proteins identified from the N. meningitidis genome have a molecular weight within 5% of that determined for the particular polypeptide in the SELDI screen. Preferred proteins have molecular weights within 2% of the molecular weight for the SELDI identified polypeptide.

[0163] N. meningitidis nucleic acid sequences identified in the mass spectrometry screen as encoding candidate vaccine antigens and their translation products are shown in SEQ ID NOS: 103-199, and are set out in Table 2 below.

TABLE 2
(proteins in bold show only 2% difference in molecular weight from SELDI
identified polypeptide; other proteins are within 5% of the SELDI identified polypeptide)

| SEQ | | | | |
|---|---|---|---|---|
| ID | SELDI | | Protein | Locus in |
| NO. | mw | Putative N. meningitidis protein | mw | genome |
| 103 | 11226.0 Da | FK506 Binding Protein | 11788.52 Da | NMB0027 |
| 105 | | Glutamyl T-RNA amidotransferase subunit C | 10958.36 Da | NMB1355 |
| 107 | | Aspartate 1-decarboxylase | 11145.70 Da | NMB1282 |
| 109 | | Hypothetical protein | 11411.19 Da | NMB0837 |
| 111 | 13712.8 Da | Probable glycine cleavage system H | 13643.07 Da | NMB0575 |
| | | protein | | |
| 113 | | 50S ribosomal protein L19 | 13767.95 Da | NMB0589 |
| 115 | | 50S ribosomal protein L20 | 13710.15 Da | NMB0723 |
| 117 | | Ribonuclease P protein component | 14211.41 Da | NMB1905 |
| 119 | | 30S ribosomal protein S6 | 13949.02 Da | NMB1323 |
| 121 | 17378.9 Da | Bacterioferritin A | 17961.25 Da | NMB1207 |
| 123 | | Disulphide bond formation protein B | 17701.21 Da | NMB1649 |
| 125 | | Dihydrofolate reductase | 17751.52 Da | NMB0308 |
| 127 | | (3R)-hydroxymyristoyl-[acyl carrier protein] | 16626.53 Da | NMB0179 |
| | | dehydratase | | |
| 129 | | Fimbral Protein (Pilin) | 17298.65 Da | NMB0018 |
| | | H8 Outer Membrane Protein | 16885.79 Da | NMB1533 |
| 131 | | 2C-methyl-D-erythritol 2,4-cyclodiphosohate | 17019.54 Da | NMB1512 |
| | | synthase | | |
| | | Superoxide Dismutase [Cn-Zn] | 17360.36 Da | NMB1398 |
| 133 | | Hypothetical protein | 17284.82 Da | NMB1816 |
| 135 | 26868.0 Da | 3-dehydroquinate dehydratase | 27186.21 Da | NMB1446 |
| 137 | | Acyl-[acyl-carrier protein]-UDP-N- | 28154.91 Da | NMB0178 |
| | | acetylglucosamine O-acetyltransferase | | |
| 139 | | Probable septum site-determining protein | 26221.11 Da | NMB0170 |
| 141 | | Hypothetical methyltransferase | 27037.62 Da | NMB1328 |
| 145 | | Na-translocating NADH-quinone reductase | 27606.57 Da | NMB0567 |
| | | subunit C | | |
| 147 | | 3-methyl-2-oxobutanoate | 27739.25 Da | NMB0870 |
| | | hydroxymethyletransferase | | |
| 149 | | Pyridoxal phosphate biosynthetic protein | 26565.58 Da | NMB0448 |
| 151 | | 1-acyl-sn-glycerol-3-phosphate | 27943.25 Da | NMB1294 |
| | | acetyltransferase | | |
| 153 | | Thiazole biosynthesis protein | 28067.06 Da | NMB2071 |
| 155 | | 3-demethylubiquinone-9 3- | 26529.48 Da | NMB2030 |
| | | metyltransferase | | |
| 157 | | Hypothetical protein | 27417.04 Da | NMB2054 |
| | 28173.6 Da | 3-dehydroquinate dehydratase | 27186.21 Da | NMB1446 |
| 159 | | Shikimate 5-Dehydrogenase | 28564.71 Da | NMB0358 |
| 161 | | Competence lipoprotein comL | 29274.90 Da | NMB0703 |
| 163 | | Dihydrolipocolinate reductase | 28328.10 Da | NMB0203 |
| | | Acyl-[acyl-carrier protein]-UDP-N- | 28154.91 Da | NMB0178 |
| | | acetylglucosamine O-acetyltransferase | | |
| | | Hypothetical methyltransferase | 27037.62 Da | NMB1328 |
| | | Na-translocating NADH-quinone reductase | 27606.57 Da | NMB0567 |
| | | subunit C | | |
| | | 3-methyl-2-oxobutanoate | 27739.25 Da | NMB0870 |
| | | hydroxymethyletransferase | | |
| | | 1-acyl-sn-glycerol-3-phosphate | 27943.25 Da | NMB1294 |
| | | acetyltransferase | | |
| | | Thiazole biosynthesis protein | 28067.06 Da | NMB2071 |
| 165 | | TonB protein | 29198.89 Da | NMB1730 |
| | | Hypothetical protein | 27417.04 Da | NMB2054 |
| 167 | 33719.3 a | GTP binding protein | 34617.03 Da | NMB0678 |
| 169 | | Glycerol-3-phosphate dehydrogenase | 35337.90 Da | NMB2060 |
| 171 | | Porphobilinogen deaminase | 33478.47 Da | NMB0539 |
| 173 | | 33 kDa chaperonin | 33204.66 Da | NMB2000 |
| 175 | | Lacto-N-neotetraose biosynthesis glycosyl | 32790.00 Da | NMB1926 |
| | | transferase | | |
| 177 | | UDP-3-O-[3-hydroxymyristoyl]- | 33986.69 Da | NMB0017 |
| | | acetylglucosamine deacetylase | | |
| 179 | | T-RNA delta(2)-isopentenylpyrophosphate | 34870.26 Da | NMB0935 |
| | | transferase | | |
| | | Class 3 protein, porin | 33845.23 Da | PorB |
| | | Class 3 protein, porin | 33845.26 Da | PorB |
| | | Class 3 protein, porin | 33868.36 Da | PorB |
| | | Class 3 protein, porin | 33786.29 Da | NMB2039 |
| 181 | | Proline iminopeptidase | 34956.75 Da | NMB0927 |
| 183 | | Recombination associated protein | 33263.72 Da | NMB0851 |
| 185 | | Glucose-1-phosphate thymidylyltransferase | 32161.71 Da | NMB0062 |
| | | Transposase for insertion sequence element | 32758.54 Da | |
| | | IS1106 | | |
| 187 | | T-RNA psuedouridine synthase B | 33632.50 Da | NMB1374 |
| 189 | | Hypothetical adenine-specific methylase | 33955.36 Da | NMB1655 |
| 191 | 66656.4 Da | Chaperone protein DNA K (heat shock | 68791.66 Da | NMB0554 |
| | | protein 70) | | |
| 193 | | 1-deoxy-D-xylulose 5-phosphate synthetase | 68749.57 Da | NMB1876 |
| 195 | | DNA primase | 65915.11 Da | NMB1537 |
| 198 | | Glutaminyl-T-RNA synthetase | 64649.85 Da | NMB1560 |
| | | Transferrin binding protein B | 63343.98 Da | TbpB |

[0164] It interesting to note that this method also identifies a number of proteins that are known to be strong vaccine antigens, such as TbpB, class 3 protein, H8 outer membrane protein and Cu,Zn superoxide dismutase. This clearly validates the effectiveness of the present method.

[0165] The identified sequences were further analysed to determine whether any of the putative proteins comprised signal sequences or transmembrane domains. Presence of these distinctive motifs is often indicative of surface exposure and can help to further identify suitable vaccine antigens.

[0166] Th presence of signal peptides was determined using the SignalP algorithm, and for transmembrane domains the TMpred algorithm was used. Both algorithms are commonly known in the art and are available from www.expasy.org (The EXPASy™, Expert Protein Analysis System is hosted by the proteomics server of the Swiss Institute of Bioinformatics)

[0167] The results of the SignalP and TMpred analysis is shown in Table 3.

TABLE 3

| | | | Signal |
|---|---|---|---|
| SEQ ID | | TM domain? | Sequence? |
| NO. | Putative N. meningitidis protein | (X/3) (TMpred) | (X/3) (SignalP) |
| 103 | FK506 Binding Protein | X | X |
| 105 | Glutamyl T-RNA amidotransferase subunit C | X | X |
| 107 | Aspartate 1-decarboxylase precursor | X | X |
| 109 | Hypothetical protein | X | X |
| 111 | Probable glycine cleavage system H protein | X | X |
| 113 | 50S ribosomal protein L19 | X | X |
| 115 | 50S ribosomal protein L20 | X | X |
| 117 | Ribonuclease P protein component | X | X |
| 119 | 30S ribosomal protein S6 | X | X |
| 121 | Bacterioferritin A | X | X |
| 123 | Disulphide bond formation protein B | 3 | 3 |
| 125 | Dihydrofolate reductase | 3 | 3 |
| 127 | (3R)-hydroxymyristoyl-[acyle carrier protein] | 3 | X |
| | dehydratase | | |
| 129 | Fimbral Protein Precursor (Pilin) | 3 | X |
| | H8 Outer Membrane Protein Precursor | 3 | 3 |
| 131 | 2C-methyl-D-erythritol 2,4-cyclodiphosphate | 3 | X |
| | synthase | | |
| | Superoxide Dismutase [Cn-Zn] Precursor | 3 | 3 |
| 133 | Hypothetical protein | X | X |
| 135 | 3-dehydroquinate dehydratase | 3 | X |
| 137 | Acyl-[acyl-carrier protein]-UDP-N- | 3 | X |
| | acetylglucosamine O-acetyltransferase | | |
| 139 | Probable septum site-determining protein | X | X |
| 141 | Hypothetical methyltransferase | X | 3 |
| 145 | Na-translocating NADH-quinone reductase | 3 | X |
| | subunit C | | |
| 147 | 3-methyl-2-oxobutanoate | X | X |
| | hydroxymethyletransferase | | |
| 149 | Pyridoxal phosphate biosynthetic protein | X | X |
| 151 | 1-acyl-sn-glycerol-3-phosphate | 3 | X |
| | acetyltransferase | | |
| 153 | Thiazole biosynthesis protein | 3 | X |
| 155 | 3-demethylubiquinone-9 3-metyltransferase | X | X |
| 157 | Hypothetical protein | X | X |
| | 3-dehydroquinate dehydratase | 3 | X |
| 159 | Shikimate 5-Dehydrogenase | 3 | X |
| 161 | Competence lipoprotein comL precursor | 3 | 3 |
| 163 | Dihydrolipocolinate reductase | 3 | X |
| | Acyl-[acyl-carrier protein]-UDP-N- | 3 | X |
| | acetylglucosamine O-acetyltransferase | | |
| | Hypothetical methyltransferase | X | X |
| | Na-translocating NADH-quinone reductase | 3 | 3 |
| | subunit C | | |
| | 3-methyl-2-oxobutanoate | 3 | X |
| | hydroxymethyletransferase | | |
| | 1-acyl-sn-glycerol-3-phosphate | 3 | X |
| | acetyltransferase | | |
| | Thiazole biosynthesis protein | 3 | X |
| 165 | TonB protein | 3 | 3 |
| | Hypothetical protein | X | X |
| 167 | GTP binding protein | X | 3 |
| 169 | Glycerol-3-phosphate dehydrogenase | 3 | X |
| 171 | Porphobilinogen deaminase | X | X |
| 173 | 33 kDa chaperonin | X | X |
| 175 | Lacto-N-neotetraose biosynthesis glycosyl | X | X |
| | transferase | | |
| 177 | UDP-3-O-[3-hydroxymyristoyl]- | X | X |
| | acetylglucosamine deacetylase | | |
| 179 | T-RNA delta(2)-isopentenylpyrophosphate | 3 | X |
| | transferase | | |
| | Class 3 protein, porin | 3 | 3 |
| | Class 3 protein, porin | 3 | 3 |
| | Class 3 protein, porin | 3 | 3 |
| | Class 3 protein, porin | 3 | 3 |
| 181 | Proline iminopeptidase | 3 | X |
| 183 | Recombination associated protein | X | X |
| 185 | Glucose-1-phosphate thymidylyltransferase | 3 | X |
| | Transposase for insertion sequence element | | |
| | IS1106 | | |
| 187 | T-RNA psuedouridine synthase B | X | X |
| 189 | Hypothetical adenine-specific methylase | 3 | X |
| 191 | Chaperone protein DNA K (heat shock protein | X | X |
| | 70) | | |
| 193 | 1-deoxy-D-xylulose 5-phosphate synthetase | 3 | X |
| 195 | DNA primase | 3 | X |
| 198 | Glutaminyl-T-RNA synthetase | X | X |
| | Transferrin binding protein B | 3 | 3 |

[0168] Although a number of the identified sequences appear to contain putative signal sequences or transmembrane domains it is surprising that a significant number also do not.

[0169] Hence, it can be seen that the methods of the invention provide methods for identifying polypeptides not previously known to have antigenic potential.

The application's sequence listing, which the Patent Office published only in electronic form, follows.

SEQUENCE LISTING (199 sequences)

SEQ ID NO: 1 - DNA, 549 bp, Neisseria lactamica
  misc_feature (395)..(395): unidentified base
  CDS (1)..(549): putative integral membrane protein
  misc_feature (427)..(427): unidentified base
  misc_feature (454)..(454): unidentified base
  misc_feature (487)..(487): unidentified base
  misc_feature (491)..(491): unidentified base
  misc_feature (492)..(492): unidentified base
  misc_feature (500)..(500): unidentified base
  misc_feature (508)..(508): unidentified base
  misc_feature (515)..(515): unidentified base
  misc_feature (524)..(524): unidentified base
  misc_feature (537)..(537): unidentified base
atgaaggttttgaacggttggtcggataggaagatgtggcgggttttaagtgctttgccgataggcgtggtgttttttgatttgatctacggttttgtgttgaatgtgttgcagggtttggatttgcagcgtgccgtgccggattcggaaggcgtgttggcggttacgcccgatattgcgttcaacagtttgcagattgtcgctacggggggatggcggcggtggtctgtttcgggttggcggttgtgttctgctcaacccgtcggttcggcggcggcaaggtcttggaaatccggggtgttccggatgttggggcttggtggcggtgttggcgtcaacgcgccttccttgtgggagtgggccaacgcgctgcccctgctgctgaagggcccggncgtggtcaatacgggcaatgcgcgttatgtgntgacgcttttgtgtatgcccttycsgnsggtgtcgtgcgtcatcgggctggtaggcaggncagnnttcagacngcatcggncaggcgncaaaggcancgtgtgcggcaanacggacggatag

SEQ ID NO: 2 - protein, 182 aa, Neisseria lactamica
  misc_feature (132)..(132): The 'Xaa' at location 132 stands for Asp, Gly, Ala, or Val.
  misc_feature (143)..(143): The 'Xaa' at location 143 stands for Met, Val, or Leu.
  misc_feature (151)..(151): The 'Xaa' at location 151 stands for Arg, or Pro.
  misc_feature (152)..(152): The 'Xaa' at location 152 stands for Arg, Thr, Gly, Ala, Pro, Trp , or Ser.
  misc_feature (163)..(163): The 'Xaa' at location 163 stands for Thr, Ala, Pro, or Ser.
  misc_feature (164)..(164): The 'Xaa' at location 164 stands for Glu, Asp, Gly, Ala, or Val.
  misc_feature (167)..(167): The 'Xaa' at location 167 stands for Gln, Arg, Pro, or Leu.
  misc_feature (170)..(170): The 'Xaa' at location 170 stands for Thr, Ala, Pro, or Ser.
  misc_feature (172)..(172): The 'Xaa' at location 172 stands for Asp, Gly, Ala, or Val.
  misc_feature (175)..(175): The 'Xaa' at location 175 stands for Asn, Ser, Thr, or Ile.
  misc_feature (179)..(179): The 'Xaa' at location 179 stands for Lys, or Asn.
  misc_feature (395)..(395): unidentified base
  misc_feature (427)..(427): unidentified base
  misc_feature (454)..(454): unidentified base
  misc_feature (487)..(487): unidentified base
  misc_feature (491)..(491): unidentified base
  misc_feature (492)..(492): unidentified base
  misc_feature (500)..(500): unidentified base
  misc_feature (508)..(508): unidentified base
  misc_feature (515)..(515): unidentified base
  misc_feature (524)..(524): unidentified base
  misc_feature (537)..(537): unidentified base
MKVLNGWSDRKMWRVLSALPIGVVFFDLIYGFVLNVLQGLDLQRAVPDSEGVLAVTPDIAFNSLQIVATGGWRRWSVSGWRLCSAQPVGSAAARSWKSGVFRMLGLGGGVGVNAPSLWEWANALPLLLKGPXVVNTGNARYVXTLLCMPFXXVSCVIGLVGRXXFRXHRXGXKGXVCGXTDG

SEQ ID NO: 3 - DNA, 549 bp, Neisseria meningitidis
  CDS (1)..(549): protein Q9JWY0
atgaaagttttgaacggttggtcggacaggaagatgtggcgggttttgagtgctttgccgataggcgtggtgttttttgatttgatctacggttttgtgttgaatgtgttgcagggtttggatttgcagcgtgccgtgccggattcggaaggcgtgttggcggttacgcccgatattgcattcaacagtttgcagattgtcgccaacggcggtatggcggcggtggtctgtttcgggttggcggttgtgtttttgctcaaccgttcggtgcggcggcggcaggtgttggaaatcggggtgttccggatgttggggctggtggcggtattggcgttcagcgcgccgtcggtgtgggagtgggcgaacgcgctgccgctgctgctgaagggcgcggacgtggtcaatacggggaatgcgcgttatgtgctgacggctttgtgtatgccctttcctgcggtgtcgtgcgtcatcgggctggtggggcggttcaggcttcagacggcatcgggcagggcggcaaagtcagggggtgcgggcaaggcggacgga

SEQ ID NO: 4 - protein, 183 aa, Neisseria meningitidis
MKVLNGWSDRKMWRVLSALPIGVVFFDLIYGFVLNVLQGLDLQRAVPDSEGVLAVTPDIAFNSLQIVANGGMAAVVCFGLAVVFLLNRSVRRRQVLEIGVFRMLGLVAVLAFSAPSVWEWANALPLLLKGADVVNTGNARYVLTALCMPFPAVSCVIGLVGRFRLQTASGRAAKSGGAGKADG

SEQ ID NO: 5 - DNA, 1416 bp, Neisseria lactamica
  CDS (1)..(1416)
  misc_feature (509)..(509): unidentified base
atcgatatggacgcgcaggaacgcagtaccagcgtttatttcccgcgccgtgtgattccgatgctgccggaaaacctgtccaacggcatttgctcgctcaatccggatgtggagcgtttgtgtatggtatgcgatatgaccgtcacttacgcgggcaatgtcaaggaatatcaattttatcccgccgtgatgcgctcccacgcaaggctgacttacaaccaagtttggaaatggctttcagacggcatcgggcatccgttcaagacccaaatcgacacgctttacaagctgtttaaagttttgcagaaaaaacgtctggcgcgcggggcggtggagtttgaaagcatagaaacgcaaatgcttttcgacggcaacggcaagattgaaaaaatcgtgcccgttgtccgcaacgatgcccacaagctgattgaggaatgtatgttggcggcaaacgtttgcgcggcggattttctgttgaaaaacaagcataccgcattgttccgcaacantttgggccccacgcccgaaaaactcgccgyyttatgacgcgaacagctcggtctgttggggctttaakgkctgwgctgkgckgacaacccgtcgccgaaagactatgccgcgcttgccggacaattcaaaggcaggccggatgccgagttgctgcaagtgatgatgttgcgctctatgcggcaggcggtttacgaaccgcattgcgargggcatttcggbttggcttatgaagcatatgcccattttacttcgcctattcgccgttatcctgatttaaccgtccaccgcgccatcaaggcgatttwaaatggacaaacatatacaccgggtaaaagctggcaagctttgggcgtgcatacttcgttttgcgaacgccgtgctgacgatgccgcccgcgatgtggaaaattggctgaaaacttattatatgcgcgataaggtcggcgaaatatttgaaggcaaaatttccggcgtggcaaattttggaatatttgtgactttggacgatatttatatcgacggtttggtacatatcagcgatttgggcgaagattatttcaacttccgccccgaaattatggcgatagagggcgaacgcagcggcatccgtttcaatatgggggacagggttgccgtccgggtcgcacgcgccgatttggatgacggaaaaatcgattttgtcctgattgcaggcggaacgggcaggcggcggaaggtcaaatcatccgcatctgccaaaccggcagggggggcggggaaagggaaaccgaaaaccgccgccgagaaaaaaacagcccggggcggcaaagtaaggggaaggggcgtgcctgccgccgcagaatcggaaagaaacaaggcaaagaaaccggtttcgataaaggtaaaaaaacggaaaggyaaatcataa

SEQ ID NO: 6 - protein, 181 aa, Neisseria lactamica
  misc_feature (170)..(170): The 'Xaa' at location 170 stands for Asn, Ser, Thr, or Ile.
  misc_feature (180)..(180): The 'Xaa' at location 180 stands for Ala, or Val.
  misc_feature (509)..(509): unidentified base
IDMDAQERSTSVYFPRRVIPMLPENLSNGICSLNPDVERLCMVCDMTVTYAGNVKEYQFYPAVMRSHARLTYNQVWKWLSDGIGHPFKTQIDTLYKLFKVLQKKRLARGAVEFESIETQMLFDGNGKIEKIVPVVRNDAHKLIEECMLAANVCAADFLLKNKHTALFRNXLGPTPEKLAXL

SEQ ID NO: 7 - protein, 9 aa, Neisseria lactamica
  misc_feature (509)..(509): unidentified base
REQLGLLGL

SEQ ID NO: 8 - protein, 279 aa, Neisseria lactamica
  misc_feature (1)..(1): The 'Xaa' at location 1 stands for Gly, Trp, or Cys.
  misc_feature (3)..(3): The 'Xaa' at location 3 stands for Ser, or Cys.
  misc_feature (4)..(4): The 'Xaa' at location 4 stands for Trp, or Cys.
  misc_feature (51)..(51): The 'Xaa' at location 51 stands for Gly.
  misc_feature (80)..(80): The 'Xaa' at location 80 stands for a stop codon, or Leu.
  misc_feature (277)..(277): The 'Xaa' at location 277 stands for Gly.
  misc_feature (509)..(509): unidentified base
XLXXADNPSPKDYAALAGQFKGRPDAELLQVMMLRSMRQAVYEPHCEGHFXLAYEAYAHFTSPIRRYPDLTVHRAIKAIXNGQTYTPGKSWQALGVHTSFCERRADDAARDVENWLKTYYMRDKVGEIFEGKISGVANFGIFVTLDDIYIDGLVHISDLGEDYFNFRPEIMAIEGERSGIRFNMGDRVAVRVARADLDDGKIDFVLIAGGTGRRRKVKSSASAKPAGGAGKGKPKTAAEKKTARGGKVRGRGVPAAAESERNKAKKPVSIKVKKRKXKS

SEQ ID NO: 9 - DNA, 2373 bp, Neisseria meningitidis
  CDS (1)..(2373): protein Q9JUD1
atgaataaaaatattaaatctttaaatttacgggaaaaagacccgtttttaagtcgtgaaaaacagcgttatgaacatcctttgcccagtcgggaatggataatcgagctgcttgaacgtaaaggcgtaccatccaagattgaagctttggtacgcgaattgtcgattaaggaagaagagtacgaatttttcgaacgtcgtctgaaggcgatggcgcgggacggtcaggttttaatcaaccgtcggggcgcggtttgcgcggcggacaaattggatttggtcaaatgccgtgtcgaggcgcacaaagacggcttcggtttcgccgtgccgctcacgcccgccaaagacggtgattttgttttgtacgaacgccagatgcgcggcattatgcacggcgatattgtcactgttcgtcctgccggcatggaccgtaggggccgccgcgaagggacggttctggatattgtcgaacgcgcgcaaagcaaagtggtcggccgtttctatatggataggggcgtggcgattttggagccggaagacaagcgtctgaaccaaagcatcgtattggaaccggacggcgtggcgcgtttcaaacctgaatccggtcaggtcatcgtcggcgaaattgaggtttatcctgagcaaaaccggccggcagtggcaaaaatcatcgaagttttgggcgattatgccgacagcggcatggagattgaaattgccgtgcgcaagcatcatttgccgcaccaattcagtgaagcgtgtgccaaagccgcgaaaaaaattcccgaccatgtacgcaaaagcgatttgaaaggccgcgtcgatttgcgcgacctgcctttggtaacgatagacggcgaaacggctcgagattttgacgatgcggtgtttgccgagaaaatcggacgcaattaccgtctggtcgtggcgattgccgatgtcagccattatgtccgccccgatgacgctatcgacacggacgctcaggaacgcagcaccagtgtttacttcccgcgccgcgtgattcccatgttgccggaaaacctgtccaacggcatctgctcgctcaatcctcatgtcgagcgtttgtgtgtggtgtgcgatatggttatcacttacgcgggcaatatcaaagaataccgcttctaccccgccgtgatgcgctctcatgcccgcctgacctacaaccaagtttggaaatggctttcaggcggcatcgagcatccgttcaaaacccaaatcgacacgctttacaaactcttcaaaatccttcagaaaaagcgtttcgaacgcggggcggtggagtttgacagcatcgaaacccaaatgcttttcgacgacaacggtaaaattgaaaaaatcgtccccgttgtccgcaacgatgcccacaagctgattgaagaatgtatgttggcggcaaacgtttgcgcagcggattttctgttgaaaaacaagcataccgcattgttccgcaaccatttggggcccacgcccgaaaaactcgccgccttgcgcgagcagctcggtctgttggggcttcaacttggcggcggcgacaacccgtcgccgaaagactatgccgcgcttgccggacagttcaaaggcaggccggatgccgaattgctgcaagtcatgatgttgcgctccatgcaacaggcggtttacgaaccgcattgcgacggacactttggtcttgcctacgaagcatacgcccacttcacctcgcccatccgccgctatcccgacctgaccgtacaccgcgccatcaaagccgtgttgaatcagcaaacctacacgccaaaaaaaagctggcaggctttgggcgtgcatacctcgttctgtgagcgccgtgccgacgacgccagccgcgacgtggaaaactggctgaaaacctattatatgcgcgataaggtcggcgaagtattcgaaggtaaaatctccggcatgaccagttttggtatctttgtaacactggacggcatccacattgacggcttggtgcatatcagcgatttgggcgaagactatttcaacttccgccccgaaatcatggcaatcgaaggcgaacgcagcggcatccgtttcaacatgggggacagggttgccgtccgggtcgcccgtgccgatttggatgacggaaaaatcgattttgtcctgattgccggggggagcggcagggggcggaaagttaaatcatccgcgtctgccaaaccggcagggacggcggggaaagggaagccgaaaaccgccgccgagaaaaaaacagcccgaggcggcaaagtaaggggaaggggcgcgtctgccgccgcagaatcgaggaaaaaggcaaagaaaccggttccgattaaggtaaaaaaacggaaaggcaaatca

SEQ ID NO: 10 - protein, 791 aa, Neisseria meningitidis
MNKNIKSLNLREKDPFLSREKQRYEHPLPSREWIIELLERKGVPSKIEALVRELSIKEEEYEFFERRLKAMARDGQVLINRRGAVCAADKLDLVKCRVEAHKDGFGFAVPLTPAKDGDFVLYERQMRGIMHGDIVTVRPAGMDRRGRREGTVLDIVERAQSKVVGRFYMDRGVAILEPEDKRLNQSIVLEPDGVARFKPESGQVIVGEIEVYPEQNRPAVAKIIEVLGDYADSGMEIEIAVRKHHLPHQFSEACAKAAKKIPDHVRKSDLKGRVDLRDLPLVTIDGETARDFDDAVFAEKIGRNYRLVVAIADVSHYVRPDDAIDTDAQERSTSVYFPRRVIPMLPENLSNGICSLNPHVERLCVVCDMVITYAGNIKEYRFYPAVMRSHARLTYNQVWKWLSGGIEHPFKTQIDTLYKLFKILQKKRFERGAVEFDSIETQMLFDDNGKIEKIVPVVRNDAHKLIEECMLAANVCAADFLLKNKHTALFRNHLGPTPEKLAALREQLGLLGLQLGGGDNPSPKDYAALAGQFKGRPDAELLQVMMLRSMQQAVYEPHCDGHFGLAYEAYAHFTSPIRRYPDLTVHRAIKAVLNQQTYTPKKSWQALGVHTSFCERRADDASRDVENWLKTYYMRDKVGEVFEGKISGMTSFGIFVTLDGIHIDGLVHISDLGEDYFNFRPEIMAIEGERSGIRFNMGDRVAVRVARADLDDGKIDFVLIAGGSGRGRKVKSSASAKPAGTAGKGKPKTAAEKKTARGGKVRGRGASAAAESRKKAKKPVPIKVKKRKGKS

SEQ ID NO: 11 - DNA, 672 bp, Neisseria lactamica
  CDS (1)..(672): Dihydrolipoamide acetyltranferase
caagccgccgcacccgcaccggctgccgcaccggctccgactgctgtcgccgcgcctgcaccttctgcacctgccgctgccaaaatcgacgaggccgctttcgccaaagcacacgccggtccttccgcacgcaaactggcgcgcgaattgggcgtggatttgggccaagtcaaaggtaccggcttgaaaggccgcatcgtgggcgacgacatcaaagcctttgtgaaatccgtaatgcaaggcggtgcggcaaaacctgccgcagccggcgcatctttgggcggcggtctggacttgcttccgtggcctaaagtggacttctccaaattcggcaatgtcgaagttaaagaattgtcccgcattaagaaaatttccggtcaaaacctgtcccgcaactgggttgtgattccccacgttaccgtacacgaagaagcggatatgaccgaactggaagaattccgcaaacagctgaacaaagaatgggaacgcgaaggcgtgaaactgtcaccgttggcgttcatcatcaaagcctccgtttccgcgctgaaagccttccccgaattcaacgcttctttggacggcgacaatctggtgctgaaaaactacttcaacatcggtttcgcagccgatacgccgaacggcttggttgttcccgtcatcaaagacgtagat

SEQ ID NO: 12 - protein, 224 aa, Neisseria lactamica
QAAAPAPAAAPAPTAVAAPAPSAPAAAKIDEAAFAKAHAGPSARKLARELGVDLGQVKGTGLKGRIVGDDIKAFVKSVMQGGAAKPAAAGASLGGGLDLLPWPKVDFSKFGNVEVKELSRIKKISGQNLSRNWVVIPHVTVHEEADMTELEEFRKQLNKEWEREGVKLSPLAFIIKASVSALKAFPEFNASLDGDNLVLKNYFNIGFAADTPNGLVVPVIKDVD

SEQ ID NO: 13 - DNA, 1605 bp, Neisseria meningitidis
  CDS (1)..(1605): protein Q9JU07
atgagtatcgtagaaatcaaagtccccgatatcggcggtcacgaaaacgtcgacatcatcgccgtagaagttaaagcgggcgacaccatcgccgttgacgacaccctgattacactggaaaccgacaaagccacgatggatgtgcctgccgatgcggccggtgtcgtgaaagaagtgaaagtcaaagtcggcgacaaaatctccgaaggcggcgtaattctgaccgttgaaaccggtgccgccgccgccgaagccgccccggctgctgccgaagcacaacctgcacctgctgccgcacccgctgccgcaggcggtgcaaccgttcaagtagccgttcccgatatcggcggccataccgatgtggatgtaatcgccgttgaaatcaaagtgggcgacaccgttgccgaagacgacacgctgattactttggaaaccgataaagcgacaatggacgtaccttgtaccgctgccggtgtcgttaaagccgtattcttaaaagtcggcgacaaagtatccgaaggctctgccattatcgaagtagaaaccgtcggctctgccgcagcagcccctgctcaagccgctcaagctgccgcaccggctgccgctccgcctccgactgctgccgccgcacccgccgccgcgcctgcaccttctgcacctgccgctgccaaaatcgacgaggccgctttcgccaaagcacacgccggcccttccgcacgcaaactggcgcgcgaattgggcgtggatttgggccaagtcaaaggtaccggcttgaaaggccgcatcgtgggcgacgacatcaaagcctttgtgaaatccgtaatgcagggcggcgcggcaaaacctgccgcagtcggcgcgtctttaggcggcggtctggacttgctgccctggcctaaagtggacttctccaaattcggtaatgtcgaagttaaagaattgtcccgcattaagaaaatttccggtcaaaacctgtctcgcaactgggtggtgattccccacgttaccgtacacgaagaagcagatatgaccgagctggaagaattccgcaaacaactgaacaaagaatgggaacgcgaaggcgtgaaactgtcaccgttggcgttcatcatcaaagcctccgtttccgcgctgaaagccttccccgaattcaacgcttctctggacggcgacaacttggtgctgaaaaactacttcaacatcggtttcgcagcagacacgccgaacggcttggttgttccagtaatcaaagacgtggatcaaaaaggcttgaaacaaatcagccaagagctgaccgaattgtctaaaaaagcccgcgaaggcaagctcaaaccacaagaaatgcaaggcgcatgctttaccatttccagcttgggcggcatcggcggcacaggtttcacgccgattgtgaacgctcccgaagtcgccatcttgggcgtgtgcaaatcccaaatcaaaccggtttggaacggcaaagaattcgctcctcgcctgatgtgcccattgagcctgtcctttgaccaccgtgtcatcgacggcgcggccggtatgcgcttcaccgtattcctggccaacctgttgaaagacttccgccgcattactctg

SEQ ID NO: 14 - protein, 535 aa, Neisseria meningitidis
MSIVEIKVPDIGGHENVDIIAVEVKAGDTIAVDDTLITLETDKATMDVPADAAGVVKEVKVKVGDKISEGGVILTVETGAAAAEAAPAAAEAQPAPAAAPAAAGGATVQVAVPDIGGHTDVDVIAVEIKVGDTVAEDDTLITLETDKATMDVPCTAAGVVKAVFLKVGDKVSEGSAIIEVETVGSAAAAPAQAAQAAAPAAAPPPTAAAAPAAAPAPSAPAAAKIDEAAFAKAHAGPSARKLARELGVDLGQVKGTGLKGRIVGDDIKAFVKSVMQGGAAKPAAVGASLGGGLDLLPWPKVDFSKFGNVEVKELSRIKKISGQNLSRNWVVIPHVTVHEEADMTELEEFRKQLNKEWEREGVKLSPLAFIIKASVSALKAFPEFNASLDGDNLVLKNYFNIGFAADTPNGLVVPVIKDVDQKGLKQISQELTELSKKAREGKLKPQEMQGACFTISSLGGIGGTGFTPIVNAPEVAILGVCKSQIKPVWNGKEFAPRLMCPLSLSFDHRVIDGAAGMRFTVFLANLLKDFRRITL

SEQ ID NO: 15 - DNA, 273 bp, Neisseria lactamica
  CDS (1)..(273)
ccggaaagtgaattggatgaatggtatttgagcgattttaaagatgaacatatatggaaaatgcaaagttacgaagcattttcatgtttgcgtgaagcagtcccctatttgtttgcttatccccgatacgggtatgaactgttggagataatttccgcgttaaaagaaacatctgatacgacagaattattttatgagccgggtatcgtgcctttgctgattgatttatataaagaagatagttatctgataaatatggtcaaacggatattc

SEQ ID NO: 16 - protein, 91 aa, Neisseria lactamica
PESELDEWYLSDFKDEHIWKMQSYEAFSCLREAVPYLFAYPRYGYELLEIISALKETSDTTELFYEPGIVPLLIDLYKEDSYLINMVKRIF

SEQ ID NO: 17 - DNA, 321 bp, Neisseria meningitidis
  CDS (1)..(321): protein Q9JX69
atgtttaaggacgaactaaatgaatttatccgattgatatccgatccggaaagtgaattggatgaatggtatttgagtgattttaaagatgaacatatatgggaaatgcaaagttacgaagcattttcatgtttgcgggaagcagtcccctatttgtttgcttatccccgatacgggtatgaactgttggagataatttccgcgttaaaagaaacatctgatacgacagaattattttatgagccgggtatcgtgcctttgctgattgctttatataaagaagatagttatctggtaaatatggtcaaacggatattcaaa

SEQ ID NO: 18 - protein, 107 aa, Neisseria meningitidis
MFKDELNEFIRLISDPESELDEWYLSDFKDEHIWEMQSYEAFSCLREAVPYLFAYPRYGYELLEIISALKETSDTTELFYEPGIVPLLIALYKEDSYLVNMVKRIFK

SEQ ID NO: 19 - DNA, 165 bp, Neisseria lactamica
  CDS (1)..(165)
actgtcgttatggcaaactttctttatccggatgaaaaaacggattggcggaatttggatgatttattcaatgagttggttttagaggaattgcgggcttcatttatggattggtatccgactgttgaagaggcaatcagccgtcatttggaagacttttcgtaa

SEQ ID NO: 20 - protein, 54 aa, Neisseria lactamica
TVVMANFLYPDEKTDWRNLDDLFNELVLEELRASFMDWYPTVEEAISRHLEDFS

SEQ ID NO: 21 - DNA, 279 bp, Neisseria meningitidis
  CDS (1)..(279): protein Q9JX70
atggaaaacgggcaacggaataaccggtttcctttggaaaaacgaattttttatctggagcattcggggcggtatctgatgatttgcgccttatcggattattcccaaaacaaacatactgtcgttatggcaaatttcatctatccggatgaaaaaacggattggcggaatttggatgatttattcaatgagttggttttagaggaattgcaggcttcatttatggattggcatccgactgttgaagaggcaatcagccgtcatttggaagacttttcg

SEQ ID NO: 22 - protein, 93 aa, Neisseria meningitidis
MENGQRNNRFPLEKRIFYLEHSGRYLMICALSDYSQNKHTVVMANFIYPDEKTDWRNLDDLFNELVLEELQASFMDWHPTVEEAISRHLEDFS

SEQ ID NO: 23 - DNA, 471 bp, Neisseria lactamica
  CDS (1)..(471)
  misc_feature (471)..(471): undetermined base
atgaaccttgatttaaccgcgcaaaaagtcagcttttcatggaaggatatyctgtgggggtatgagaataaatacttgggttggactgatgtggcagcttatgcccgaaaaatgacgctttcagattgtgacgaacgcgtgttcaaactatctttaaccaacaaatccaatattcttgaattaaagcctgttctggaagatttggcttcagaaatgagtggktattcccctaaaaattggctgtacatcctcttaagcgatgtattccatagaaaagaagaatttgatgaccctttgggggaagttgaaaaaatttatgcggattttgattacccggaagaaatagagcatttgtcaggtatatgccgccaaagacggttatattccttctgcccacasaatgaagaaaatattgcccggttatatgttcattgggaacgatattttgcacamgcggsgggcaggattaan

SEQ ID NO: 24 - protein, 157 aa, Neisseria lactamica
  misc_feature (17)..(17): The 'Xaa' at location 17 stands for Ile.
  misc_feature (74)..(74): The 'Xaa' at location 74 stands for Gly.
  misc_feature (133)..(133): The 'Xaa' at location 133 stands for Gln, or His.
  misc_feature (151)..(151): The 'Xaa' at location 151 stands for Gln, or His.
  misc_feature (153)..(153): The 'Xaa' at location 153 stands for Gly, or Ala.
  misc_feature (157)..(157): The 'Xaa' at location 157 stands for Lys, or Asn.
  misc_feature (471)..(471): undetermined base
MNLDLTAQKVSFSWKDXLWGYENKYLGWTDVAAYARKMTLSDCDERVFKLSLTNKSNILELKPVLEDLASEMSXYSPKNWLYILLSDVFHRKEEFDDPLGEVEKIYADFDYPEEIEHLSGICRQRRLYSFCPXNEENIARLYVHWERYFAXAXGRIX

SEQ ID NO: 25 - DNA, 471 bp, Neisseria meningitidis (group B)
  CDS (1)..(471): protein Q9JQT0
atgaaccttgatttaaccgcgcaaaaagtccgtctttcttggaaggatattctgtgggggtatgggaataaatacttgggttgggctgatgtggcagcttatgcccgaaaaatgacgctttcagatcatgatgaacgtgtgttcaaactatctttaatcaacaaatccaatattcttgaattaaagcctgttctggaagatttggcttcggaaatgagggattattcccctaaaaattggctgtacgtcctcttaagcgatgtattccatagaaaagaagaatttgaggatcctttgggggaagttgaaaaaatttatgcagattttgattatccggaagaaatagaatcatttgtcaggtatatgccgcccaaagacggttatattccttctgcccacacctatgaagaaaatattgcccggttatattctcactgggaacactatttgaacaacggcggagggcagggt

SEQ ID NO: 26 - protein, 157 aa, Neisseria meningitidis (group B)
MNLDLTAQKVRLSWKDILWGYGNKYLGWADVAAYARKMTLSDHDERVFKLSLINKSNILELKPVLEDLASEMRDYSPKNWLYVLLSDVFHRKEEFEDPLGEVEKIYADFDYPEEIESFVRYMPPKDGYIPSAHTYEENIARLYSHWEHYLNNGGGQG

SEQ ID NO: 27 - DNA, 270 bp, Neisseria lactamica
  CDS (1)..(270)
atgacggttgataaggaacaagtagaaaagatgatttattctgaaaataaacagagtgttattgacgggatgctcggtatgacctttagstcggaggaggatgaaatcccctggaatttaccgagaaagttgacggagttgtcgaaacataaagacttggatattgccagattgtcattaacctgtttcggacatctcgccaggatgcatgaaaatatcggcgattgcgataaagtgattgctttattgcgctcaaaacaaggtgatcca

SEQ ID NO: 28 - protein, 90 aa, Neisseria lactamica
  misc_feature (30)..(30): The 'Xaa' at location 30 stands for Arg, or Ser.
MTVDKEQVEKMIYSENKQSVIDGMLGMTFXSEEDEIPWNLPRKLTELSKHKDLDIARLSLTCFGHLARMHENIGDCDKVIALLRSKQGDP

SEQ ID NO: 29 - DNA, 333 bp, Neisseria meningitidis
  CDS (1)..(333): protein Q9JX71
atgacggttgataaggaacaagtagaaaagatgatttattctgaaaataaacagagtgttattgacggtatgctcggtatgaccttcagctcggaggaggatgaaatcccctggatttccgagaagttgacggagttgtcgaaacataaagacttggatattgccagattgtcattaacctgtttcggacatctcgccaggatgcatgaaaatatcggcgattgcgataaagtgattgctttattgctctcaaaacaaggtgatccggattttcaaggttttgccgaagatgcgttagacgagatttctttatttatatttaaaaagcgtccg

SEQ ID NO: 30 - protein, 111 aa, Neisseria meningitidis
MTVDKEQVEKMIYSENKQSVIDGMLGMTFSSEEDEIPWISEKLTELSKHKDLDIARLSLTCFGHLARMHENIGDCDKVIALLLSKQGDPDFQGFAEDALDEISLFIFKKRP

SEQ ID NO: 31 - DNA, 918 bp, Neisseria lactamica
  misc_feature (13)..(13): undetermined base
  misc_feature (917)..(918): undetermined bases
  CDS (1)..(918)
  misc_feature (29)..(29): undetermined base
aaagatcccgggnatcaggcgctgtcccngctgtatgcggacgaatggcggaagccttcggcgcgttggattgccggtgcggcttcgcacagtttgtggctttgcacattgggcgggatgctggtgtcggtattgctgctgcttttggtgcgccaatataccttcaactgggaaagcacgctgttgagcaatgccgcttcggtacgcgcggtggaaatgctggcgtggctsccgtcgaaactcggttttcccgcaccggacgcgcgggcggtagttgaaggtcgtctgaacggcaatatcgcggatgcgcgcgcgtggtcgggcttgttggtcggcagcattgcctgctacggcatcctgccgcgcctgctggcttgggcggtatgcaaaatctttttaaaaacaagccaaagcaaattggatttggagaagccttattatcaggcggtcatccgccgctggcagaacaaaattaccgatgcggatacgcatcaggaaaccgtgtccgccgtttctccgaaaatcactttaaacgacgctcctaagtgggcagtcatgctggagaccgaatggcacgaaagcacatggtttacgggcagattggcgcaggaatggctggataaaggcgtascggcgaatcgggaarargtggctgytttggaaaacgagttgaaacaraaacccgcccagcttctaatcggsgkacscscggaaaccgtccccgaccgaggcgtgttgcggcagattgtccgactctcgraagcggcgcagggcggcgcggtggtgcarcttttggcggaacaagggctttmagmcracctttcggaaaagctggaacattggcgtaacscgctgaccgaatgcggtgcggcgtggcttgagcctgacaggggggcgcaggaaggccgtctgaaaann

SEQ ID NO: 32 - protein, 306 aa, Neisseria lactamica
  misc_feature (5)..(5): The 'Xaa' at location 5 stands for Asn, Asp, His, or Tyr.
  misc_feature (10)..(10): The 'Xaa' at location 10 stands for Gln, Arg, Pro, or Leu.
  misc_feature (77)..(77): The 'Xaa' at location 77 stands for Leu.
  misc_feature (211)..(211): The 'Xaa' at location 211 stands for Ala, or Pro.
  misc_feature (216)..(216): The 'Xaa' at location 216 stands for Glu, or Lys.
  misc_feature (219)..(219): The 'Xaa' at location 219 stands for Ala, or Val.
  misc_feature (234)..(234): The 'Xaa' at location 234 stands for Gly.
  misc_feature (235)..(235): The 'Xaa' at location 235 stands for Gly, or Val.
  misc_feature (236)..(236): The 'Xaa' at location 236 stands for Arg, or Pro.
  misc_feature (237)..(237): The 'Xaa' at location 237 stands for Ala, or Pro.
  misc_feature (254)..(254): The 'Xaa' at location 254 stands for Glu, or Lys.
  misc_feature (271)..(271): The 'Xaa' at location 271 stands for a stop codon, or Ser.
  misc_feature (272)..(272): The 'Xaa' at location 272 stands for Asp, or Ala.
  misc_feature (273)..(273): The 'Xaa' at location 273 stands for Asp, or Asn.
  misc_feature (284)..(284): The 'Xaa' at location 284 stands for Ala, or Pro.
  misc_feature (306)..(306): The 'Xaa' at location 306 stands for Lys, Asn, Arg, Ser, Thr, Ile , or Met.
  misc_feature (13)..(13): undetermined base
  misc_feature (917)..(918): undetermined bases
  misc_feature (29)..(29): undetermined base
KDPGXQALSXLYADEWRKPSARWIAGAASHSLWLCTLGGMLVSVLLLLLVRQYTFNWESTLLSNAASVRAVEMLAWXPSKLGFPAPDARAVVEGRLNGNIADARAWSGLLVGSIACYGILPRLLAWAVCKIFLKTSQSKLDLEKPYYQAVIRRWQNKITDADTHQETVSAVSPKITLNDAPKWAVMLETEWHESTWFTGRLAQEWLDKGVXANREXVAXLENELKQKPAQLLIXXXXETVPDRGVLRQIVRLSXAAQGGAVVQLLAEQGLXXXLSEKLEHWRNXLTECGAAWLEPDRGAQEGRLKX

SEQ ID NO: 33 - DNA, 1338 bp, Neisseria meningitidis (group B)
  CDS (1)..(1338): protein Q9JYD0
atgttgaatccatcccgaaaactggttgagctggtccgtattttggacgaaggcggttttattttcagcggcgatcccgtacaggcgacggaggctttgcgccgcgtggacggcagtacggaggaaaaaatcatccgtcgggcggagatgattgacaggaaccgtatgctgcgggagacgttggaacgtgtgcgtgcggggtcgttctggttgtgggtggtggcggcgacgtttgcattttttaccggtttttcagtcacttatcttctaatggacaatcagggtctgaatttctttttggttttggcgggcgtgttgggcatgaatacgctgatgctggcagtatggttggcaatgttgttcctgcgtgtgaaagtggggcgttttttcagcagtccggcgacgtggtttcggggcaaagaccctgtaaatcaggcggtgttgcggctgtatgcggacgagtggcggcaaccttcggtacgttggaaaataggcgcaacgtcgcacagcctgtggctctgcacgctgctcggaatgctggtgtcggtattgttgctgcttttggtgcggcaatatacgttcaactgggaaagcacgctgttgagcaatgccgcttcggtacgcgcggtggaaatgttggcatggctgccgtcgaaactcggtttccctgtccccgatgcgcgggcggtcatcgaaggccgtctgaacggcaatattgccgatgcgcgggcttggtcggggctgctggtcggcagtatcgcctgctacggcatcctgccgcgcctgctggcttgggtagtgtgtaaaatccttttgaaaacaagcgaaaacggattggatttggaaaagccctattatcaggcggtcatccgccgctggcagaacaaaatcaccgatgcggatacgcgtcgggaaaccgtgtccgccgtttcaccgaaaatcatcttgaacgatgcgccgaaatgggcggtcatgctggagaccgagtggcaggacggcgaatggttcgagggcaggctggcgcaggaatggctggataagggcgttgccaccaatcgggaacaggttgccgcgctggagacagagctgaagcagaaaccggcgcaactgcttatcggcgtgcgcgcccaaactgtgccggaccgcggcgtgttgcggcagattgtccgactctcggaagcggcgcagggcggcgcggtggtgcagcttttggcggaacaggggctttcagacgacctttcggaaaagctggaacattggcgtaacgcgctggccgaatgcggcgcggcgtggcttgagcctgacagggcggcgcaggaagggcgtttgaaagaccaa

SEQ ID NO: 34 - protein, 446 aa, Neisseria meningitidis (group B)
MLNPSRKLVELVRILDEGGFIFSGDPVQATEALRRVDGSTEEKIIRRAEMIDRNRMLRETLERVRAGSFWLWVVAATFAFFTGFSVTYLLMDNQGLNFFLVLAGVLGMNTLMLAVWLAMLFLRVKVGRFFSSPATWFRGKDPVNQAVLRLYADEWRQPSVRWKIGATSHSLWLCTLLGMLVSVLLLLLVRQYTFNWESTLLSNAASVRAVEMLAWLPSKLGFPVPDARAVIEGRLNGNIADARAWSGLLVGSIACYGILPRLLAWVVCKILLKTSENGLDLEKPYYQAVIRRWQNKITDADTRRETVSAVSPKIILNDAPKWAVMLETEWQDGEWFEGRLAQEWLDKGVATNREQVAALETELKQKPAQLLIGVRAQTVPDRGVLRQIVRLSEAAQGGAVVQLLAEQGLSDDLSEKLEHWRNALAECGAAWLEPDRAAQEGRLKDQ

SEQ ID NO: 35 - DNA, 969 bp, Neisseria lactamica
  CDS (1)..(969)
  misc_feature (255)..(255): undetermined base
  misc_feature (261)..(261): undetermined base
  misc_feature (326)..(326): undetermined base
  misc_feature (391)..(391): undetermined base
atgaacacacgccccctttccctcgccgtcgtcggacacaccaataccggcaaacgttcgcttttgcgtaccctgttgcgcgacagcggcttcggcgaagtcaaaaacgccccgtccaccacgcgttatgtcgaagaagccgcgatttccgacggcggcgatacgctgctgaacctatacgacacgcccggactcgaagacgcgggcggcgttttggaatggctggaaacccatacggatacgcgttcagacggncgcganccggttctcgacaaatatcgtgatgaacttattatcctgtcgtggtgcgccaaaccgattatgcntgtgttcaactttaccggcggacagcttcccgaatcgtggacggctatgctggcgcggagaaacntgcacgttttttcggggtttgatactgttgcctttgattttgaaggcgaattggatttatggaacaaactcgccactatgttgccgcaacaaggcatcatcgaccgcctgaccgccgcccgccgccgcgaatggacgcgtttggacaaagaagcgcggcacgaaatcgccgactttttaattgatgctgccgccttcaggcaggaagtggacgaaaacgaggataccgccaccgtgttgcaaaccatgcaggcggaaatacgccaactcgaacggcagatgcagcagcggctgtttgccctctaccgtttctatcacagcgaaatcgacggcggcgactggatgccgcaagccttccgtcaagacccgttcgacagcgaattgctcaaacaatacggcatccgcaccggcacgggcgcggcaaccggcgcactcatcggcttggggctggacatcgccacgttcggcggctcgctcggcttggggacggcaatcggcggctttttgggcggcatcctgcccaatacccgcaccatttccgacaaacttaccggccgccaaaccttacacaccgatcca

SEQ ID NO: 36 - protein, 323 aa, Neisseria lactamica
  misc_feature (87)..(87): The 'Xaa' at location 87 stands for Glu, or Asp.
  misc_feature (109)..(109): The 'Xaa' at location 109 stands for His, Arg, Pro, or Leu.
  misc_feature (131)..(131): The 'Xaa' at location 131 stands for Met, Val, or Leu.
  misc_feature (255)..(255): undetermined base
  misc_feature (261)..(261): undetermined base
  misc_feature (326)..(326): undetermined base
  misc_feature (391)..(391): undetermined base
MNTRPLSLAVVGHTNTGKRSLLRTLLRDSGFGEVKNAPSTTRYVEEAAISDGGDTLLNLYDTPGLEDAGGVLEWLETHTDTRSDGRXPVLDKYRDELIILSWCAKPIMXVFNFTGGQLPESWTAMLARRNXHVFSGFDTVAFDFEGELDLWNKLATMLPQQGIIDRLTAARRREWTRLDKEARHEIADFLIDAAAFRQEVDENEDTATVLQTMQAEIRQLERQMQQRLFALYRFYHSEIDGGDWMPQAFRQDPFDSELLKQYGIRTGTGAATGALIGLGLDIATFGGSLGLGTAIGGFLGGILPNTRTISDKLTGRQTLHTDP

SEQ ID NO: 37 - DNA, 1392 bp, Neisseria meningitidis
  CDS (1)..(1392): protein Q9JTB4
atgaacaaacaacccctttccctcgccgtcgtcgggcataccaataccggcaaaacctcgctcctgcgcaccctattgcgcgacagcggcttcggcgaagtcaaaaatgccccgtccactacgcgccatgtcgaagaagccgccatcagcgacggcgcagacacgctggttttcctgtatgacacgcccggactcgaagacgcgggcggtgttttggaatggctggaaacccatacggatacgcgttcagacggcatcgaacggctgcaacagtttctcggcagccacggcgcgcaccatgatttcaatcaggaagccaaagtcttacggcaagtcttgcaaagcgatatggcaatgtacgtcatcgacgcgcgcgaacccgtcctcgacaaatacagggacgagttgaccatcctttcatggtgtgccaaaccggttatgcccgtgttcaactttaccggcggacagcctcccgaatcgtggacaaccatgctggcgaggagaaacctgcacgttttcgcagggttcgacaccgtcgcctttgattttgaaggcgaactacgcctgtgggaaaacctcgccaccatgttgcccgaacgcagcacacttgaccgcctgacagccatgcgccggcgcgaatggcagcggctggacggcgaagcgcgccgcgaaatcgccgactttttaattgatgccgccgccttcaggcaggaagtggacgaaaacgaggataccgccaccgtgccgcaaaccatgcaggcggaaatacgccaactcgaacggcagatgcagcagcggctgtttgccctttaccgtttctaccacagcgaaatcgacggcggcgactggatgccgcaagccttccgccaagacccgttcgacagcgaattgctcaaacaatacggcatccgcaccggcacgggcgcggcaaccggcgcgctcatcggcttggggctggacatcgccacactcggcggctcgctcggattgggtacggcaatcggcggctttttgggcggcatcctgcccaatacccgcaccatttctgacaaactcgccggccgtcaaaccctgcacaccgaccccgaaaccctgaccctgctcgccgcccgcgccctcgatctgctccacgtcctgcaaacgcgcggacacgcggcacagtcggatatcgagctgcacagccgcaaagtcccgtgggatgccgccagactcccgcccgaactcaacaaagcccgcagtcattggaaatggtcgtcgctcaatacgcaccgcccggaaaccagccgcgccgaacgcgccggatatgtggagaaacttcaaatccgcctgtcgggaaaatatagtgaattaaatttaaatcaggacaaggcggcgagccgcagacagtacaaa

SEQ ID NO: 38 - protein, 464 aa, Neisseria meningitidis
MNKQPLSLAVVGHTNTGKTSLLRTLLRDSGFGEVKNAPSTTRHVEEAAISDGADTLVFLYDTPGLEDAGGVLEWLETHTDTRSDGIERLQQFLGSHGAHHDFNQEAKVLRQVLQSDMAMYVIDAREPVLDKYRDELTILSWCAKPVMPVFNFTGGQPPESWTTMLARRNLHVFAGFDTVAFDFEGELRLWENLATMLPERSTLDRLTAMRRREWQRLDGEARREIADFLIDAAAFRQEVDENEDTATVPQTMQAEIRQLERQMQQRLFALYRFYHSEIDGGDWMPQAFRQDPFDSELLKQYGIRTGTGAATGALIGLGLDIATLGGSLGLGTAIGGFLGGILPNTRTISDKLAGRQTLHTDPETLTLLAARALDLLHVLQTRGHAAQSDIELHSRKVPWDAARLPPELNKARSHWKWSSLNTHRPETSRAERAGYVEKLQIRLSGKYSELNLNQDKAASRRQYK

SEQ ID NO: 39 - DNA, 564 bp, Neisseria lactamica
  misc_feature (359)..(359): undetermined base
  misc_feature (372)..(372): undetermined base
  misc_feature (388)..(388): undetermined base
  misc_feature (451)..(451): undetermined base
  CDS (1)..(564): pyruvate dehydrogenase subunit C (pyruvate dehydrogenase E1 compo nent)
atgcccgaaggtgcagaacaagacatcttgaaaggtatgtacctgctgaaagccggcggcaaaggcgacaagaaagtccaattgatgggttccggtaccatcctgcaagaagtcattgccggtgcagaattgttgaaagccgacttcggcgtagaagcagatatctggtcttgcccgtccttcaacctgctgcaccgcgacgctgtcgaggtggaacgcttcaaccgcctgcatccgctggaagccgaaaaagtaccgttcgttacttcccaactgcaaggtcatgacggtccagtgattgccgctaccgactacatccgcagctatgccgaccgtatccgcgcctacatcccgaacgnctaccacgtcttnggtaccgatggcttcngccgttccgacagccgttccaacctgcgcagcttctttgaagtagaccgctacaacgttgccnttgccgcattggcccgattggcggaacaaggcaaagtcarcaaaragaccgttcaacaagctattgaamaatacggcatcaaagccgattcggctcctarctggaaacgctga

SEQ ID NO: 40 - protein, 187 aa, Neisseria lactamica
  misc_feature (120)..(120): The 'Xaa' at location 120 stands for Asp, Gly, Ala, or Val.
  misc_feature (124)..(124): The 'Xaa' at location 124 stands for Leu, or Phe.
  misc_feature (130)..(130): The 'Xaa' at location 130 stands for Ser, Gly, Arg, or Cys.
  misc_feature (151)..(151): The 'Xaa' at location 151 stands for Ile, Val, Leu, or Phe.
  misc_feature (164)..(164): The 'Xaa' at location 164 stands for Ser, or Asn.
  misc_feature (166)..(166): The 'Xaa' at location 166 stands for Glu, or Lys.
  misc_feature (174)..(174): The 'Xaa' at location 174 stands for Lys, or Gln.
  misc_feature (184)..(184): The 'Xaa' at location 184 stands for Ser, or Asn.
  misc_feature (359)..(359): undetermined base
  misc_feature (372)..(372): undetermined base
  misc_feature (388)..(388): undetermined base
  misc_feature (451)..(451): undetermined base
MPEGAEQDILKGMYLLKAGGKGDKKVQLMGSGTILQEVIAGAELLKADFGVEADIWSCPSFNLLHRDAVEVERFNRLHPLEAEKVPFVTSQLQGHDGPVIAATDYIRSYADRIRAYIPNXYHVXGTDGFXRSDSRSNLRSFFEVDRYNVAXAALARLAEQGKVXKXTVQQAIEXYGIKADSAPXWKR

SEQ ID NO: 41 - DNA, 2661 bp, Neisseria meningitidis
  CDS (1)..(2661): protein Q9JU08
atgtccacccaattacacgatgttgaccctatcgaaacccaagagtggctggacgcgttaagctccgtcctcgaatatgaaggcggcgaacgcgcgcaatacctcttggaaaacctggtcaaatactgccgcgacaagggcgtacgtatgccacacggcacgaccaccccgtatttgaataccgtttcggttgaaaacgaaaaaggcattccgggcgaccaaaacatcgaacaccgcatccgcgcattcgtgcgctggaacgccgccgccatcgtattgcgcgccggcaagaaagatttggaactgggtgggcacatcgcatctttccaatctgccgccaccatgtacgaagtcggtttcaaccacttttggaaagccaaaggcgaaggcgaagaaggcgatttggtcttcttccaaggtcacgtcgccccgggcatctatgcacgcgcattcgtcgagggccgtctgaccgaagaccagctgaacaacttccgcctagaagtggacggacacggtctgccttcctatccgcacccccacctcttgcccgacttttggcagttcccgaccgtatccatgggcttggggcccatcatggcgatttatcaggcgcgtttcctgaaatacttggaatcgcgtggtttggcaaaaaccaaaggccgtaaagtatggtgtttctgcggcgacggcgaaatggacgaacccgaatctcaaggtgcaatcgcactggctgcacgcgaaggcttggacaacctgattttcgtcatcaactgcaacctgcaacgcttggacggtccggtacgcggcaacggcaaaatcatccaagaattggaaggcaactttgccggcgccggctggaatgtcgtcaaagtcatttggggccgccgctgggaccgcctcttggcgaaagacaaagacggtatcctgcgccaacgtatggaagaatgtttggacggcgactaccaaacttacaaatccaaagacggcgcgtatgtgcgcgaacacttcttcaatacgcccgaactgaaaacattggttgccgatatgaccgatgagcaactctgggcattgaaccgcggcggccacgacccgcaaaaagtgtacaacgcctacgaccgcgcagcgaaccatgccgacggcaaacctaccgtcatcttggcgaaaaccattaaaggttacggtatgggcgcatccggcgaaggtcagaacgttgcccaccaagccaaaaaaatggacaaagcgtccctgaaacaattccgcgaccgctttgacattccggttaccgacgaacaaatcgaaagcggcgatctgccttacctgacttttgcccccgatacggaagaatacaaatacctgcacgcacgccgcgatgctttgggtggctacctgccgcaacgcaaaccgacgcaggaagtattggaagtgcccgagctgtcagcattcgacgcacaactcaaatccagcggtgaacgcgagttctcgaccacgatggcattcgtccgcatcctgtccactttgctgaaagacaaaaaaatcggcaaacgcgtcgtacctatcgttcccgacgaaagccgtactttcggcatggaaggtatgttccgccaatacggtatttggaatccgaaaggtcagcaatatacccctcaagacaaagaccaactgatgttctataaagaatccgttgacggtcaaatcttgcaagaaggtattaacgaaccgggcgcgatggccgactggattgcggctgcaaccagctacgccaacagcaacttcgcgatgattccgttctacatttactattctatgttcggtttccaacgtgtcggcgacttggcatgggcagccggtgatatgcacgcgcgcggcttcctgctgggcggtactgccggccgtacgacgctgaacggcgaaggcctgcaacacgaagacggccacagccacatccaggccgacctgattccgaactgcgtatcttatgacccgactttccaatacgaagtcgccgtcatcgtacaagacggtctgcgccgtatgtatgccaataatgaagacgtgttctactacatcaccctgatgaacgagaactacacccatccggatatgcccgaaggtgcggaacaagacatcctgaaaggtatgtatctgctgaaagccggcggcaaaggcgacaagaaagttcaattgatgggctccggtaccatcctgcaagaagtcattgccggtgccgagctgctgaaagccgacttcggcgtagaagcagacatctggtcttgcccgtccttcaacctgctgcaccgcgacgctgtcgaggtagaacgcttcaaccgcctgcatccgctggaagccgaaaaagtacctttcgttacttcccaactgcaaggtcatgacggtccggtgattgccgctaccgactatatccgcagctatgctgaccgtatccgcgcctacatcccgaacgactaccacgtcttgggcactgacggtttcggccgttccgacagtcgcgccaacctgcgccgcttctttgaagtggatcgctacaacgttgccgtggccgcattggccgcattggcggaacaaggcaaagtcagcaaagaaaccgttcaacaagccattgagaaatacggcatcaaagccgattcagctcctagctggaaacgc

SEQ ID NO: 42 - protein, 887 aa, Neisseria meningitidis
MSTQLHDVDPIETQEWLDALSSVLEYEGGERAQYLLENLVKYCRDKGVRMPHGTTTPYLNTVSVENEKGIPGDQNIEHRIRAFVRWNAAAIVLRAGKKDLELGGHIASFQSAATMYEVGFNHFWKAKGEGEEGDLVFFQGHVAPGIYARAFVEGRLTEDQLNNFRLEVDGHGLPSYPHPHLLPDFWQFPTVSMGLGPIMAIYQARFLKYLESRGLAKTKGRKVWCFCGDGEMDEPESQGAIALAAREGLDNLIFVINCNLQRLDGPVRGNGKIIQELEGNFAGAGWNVVKVIWGRRWDRLLAKDKDGILRQRMEECLDGDYQTYKSKDGAYVREHFFNTPELKTLVADMTDEQLWALNRGGHDPQKVYNAYDRAANHADGKPTVILAKTIKGYGMGASGEGQNVAHQAKKMDKASLKQFRDRFDIPVTDEQIESGDLPYLTFAPDTEEYKYLHARRDALGGYLPQRKPTQEVLEVPELSAFDAQLKSSGEREFSTTMAFVRILSTLLKDKKIGKRVVPIVPDESRTFGMEGMFRQYGIWNPKGQQYTPQDKDQLMFYKESVDGQILQEGINEPGAMADWIAAATSYANSNFAMIPFYIYYSMFGFQRVGDLAWAAGDMHARGFLLGGTAGRTTLNGEGLQHEDGHSHIQADLIPNCVSYDPTFQYEVAVIVQDGLRRMYANNEDVFYYITLMNENYTHPDMPEGAEQDILKGMYLLKAGGKGDKKVQLMGSGTILQEVIAGAELLKADFGVEADIWSCPSFNLLHRDAVEVERFNRLHPLEAEKVPFVTSQLQGHDGPVIAATDYIRSYADRIRAYIPNDYHVLGTDGFGRSDSRANLRRFFEVDRYNVAVAALAALAEQGKVSKETVQQAIEKYGIKADSAPSWKR

SEQ ID NO: 43 - DNA, 1257 bp, Neisseria lactamica
  CDS (1)..(1257): dihydrolipoamide acetyltransferase
  misc_feature (779)..(779): undetermined base
  misc_feature (819)..(819): undetermined base
  misc_feature (839)..(839): undetermined base
akgagtatsgtaraaatcaaagtccccgatatcggcggtcacgaaaacgtcgacatcatcgccgtagaagttaaagcgggcgacaccatcgccgttgacgacaccctgattactttggaaaccgacaaagccacgatggatgtgcctgccgatgcggccggtgtcgtgaaagaagtaaaagtcaaagtcggtgacaaaatctccgaaggcggcgtaattttgaccgttgaaaccggtgccgccgctgccgaagccgccccggctgccgccgctgaaacacaacctgcacctgccgccacaggcggtgcaaccgttcaagtagccgtccccgatatcggcggccataccgatgtggatgtaatcgccgttgaaatcaaagtgggcgacaccgttgccgaagacgacacgctgattactttggaaaccgacaaagcgacaatggacgtaccttgtaccgctgccggtgtcgttaaagccgtattcttaaaagtcggcgacaaagtgtccgaaggctctgccattatcgaagtagaaaccgccggctctgccgcagcagcccctgctcaagccgccgcacccgcaccggctgccgcaccggctccgactgctgtcgccgcgcctgcaccttctgcacctgccagccctgccaaaaaaatcgaccgagcgccgcwttacgccaaagcaccaccgcacggtccttccgcacgcaaactggcgcgcgaattgggcgttggattgggccaagtcaaaggtaccggcttgaaaggccgcatcgtggncgasgacatcaaagccttygtgaaatccggwaatgcaagncggtscggcaaamcctyscngcagccgggcgcatctttgggcggcggtctggacttgctgccgtggcctaaagtggacttctccaaattcggcaatgtcgaagttaaagaattgtcccgcattaagaaaatttccggtcaaaacctgtcccgcaactgggttgtgattccccacgttaccgtacacgaagaagcggatatgaccgaactggaagaattccgcaaacagctgaacaaagaatgggaacgcgaaggcgtgaaactgtcaccgttggcgttcatcatcaaagcctccgtttccgcgctgaaagccttccccgaattcaacgcttctttggacggcgacaatctggtgctgaaaaactacttcaacatcggtttcgcagccgatacgccgaacggcttggttgttcccgtcatcaaagacgtagatccaaag

SEQ ID NO: 44 - protein, 419 aa, Neisseria lactamica
  misc_feature (1)..(1): The 'Xaa' at location 1 stands for Arg, or Met.
  misc_feature (3)..(3): The 'Xaa' at location 3 stands for Met, or Ile.
  misc_feature (5)..(5): The 'Xaa' at location 5 stands for Glu, or Lys.
  misc_feature (224)..(224): The 'Xaa' at location 224 stands for His, or Leu.
  misc_feature (260)..(260): The 'Xaa' at location 260 stands for Asp, Gly, Ala, or Val.
  misc_feature (261)..(261): The 'Xaa' at location 261 stands for Glu, or Asp.
  misc_feature (270)..(270): The 'Xaa' at location 270 stands for Gly.
  misc_feature (273)..(273): The 'Xaa' at location 273 stands for Arg, or Ser.
  misc_feature (275)..(275): The 'Xaa' at location 275 stands for Cys, or Ser.
  misc_feature (278)..(278): The 'Xaa' at location 278 stands for Thr, or Pro.
  misc_feature (279)..(279): The 'Xaa' at location 279 stands for Ser, Leu, or Phe.
  misc_feature (280)..(280): The 'Xaa' at location 280 stands for Gln, Arg, Pro, or Leu.
  misc_feature (779)..(779): undetermined base
  misc_feature (819)..(819): undetermined base
  misc_feature (839)..(839): undetermined base
XSXVXIKVPDIGGHENVDIIAVEVKAGDTIAVDDTLITLETDKATMDVPADAAGVVKEVKVKVGDKISEGGVILTVETGAAAAEAAPAAAAETQPAPAATGGATVQVAVPDIGGHTDVDVIAVEIKVGDTVAEDDTLITLETDKATMDVPCTAAGVVKAVFLKVGDKVSEGSAIIEVETAGSAAAAPAQAAAPAPAAAPAPTAVAAPAPSAPASPAKKIDRAPXYAKAPPHGPSARKLARELGVGLGQVKGTGLKGRIVXXDIKAFVKSXNAXRXGKXXXQPGASLGGGLDLLPWPKVDFSKFGNVEVKELSRIKKISGQNLSRNWVVIPHVTVHEEADMTELEEFRKQLNKEWEREGVKLSPLAFIIKASVSALKAFPEFNASLDGDNLVLKNYFNIGFAADTPNGLVVPVIKDVDPK

SEQ ID NO: 45 - DNA, 1605 bp, Neisseria meningitidis; identical to SEQ ID NO: 13
  CDS (1)..(1605): protein Q9JU07

SEQ ID NO: 46 - protein, 535 aa, Neisseria meningitidis; identical to SEQ ID NO: 14

SEQ ID NO: 47 - DNA, 2373 bp, Neisseria lactamica
  CDS (1)..(2373): alanyl tRNA synthetase
  misc_feature (1563)..(1563): undetermined base
  misc_feature (1569)..(1569): undetermined base
  misc_feature (1574)..(1575): undetermined bases
  misc_feature (1579)..(1579): undetermined base
  misc_feature (1594)..(1594): undetermined base
  misc_feature (1654)..(1654): undetermined base
  misc_feature (1656)..(1656): undetermined base
  misc_feature (1968)..(1968): undetermined base
  misc_feature (2284)..(2284): undetermined base
tttaccaacgcgggcatgaaccagtttaaagacgtatttttaggtttcgacaaacgcccgtacagccgcgccaccaccgcgcaaaaatgcgtacgcgcaggcggaaagcacaacgacctggaaaacgtcggttacaccgcccgccaccacaccttctttgaaatgatgggcaacttctccttcggcgactacttcaagcgcgatgccatccacttcgcttgggagtttctcacttcccccgaatggttcaatatcccmaaagataaactcttggcgaccgtttacgcagaagacgatgaagcctacaacatctggctgaacgaaatcggtatgccgtccgagcgcatcgtccgcatcggcgacaacaaaggcgcgaaatacgcgtctgataatttttggcaaatgggcgataccggcccctgcggcccctgctccgaaattttctacgaccacggcgaagaaatctggggcggcattccgggcagccccgaagaagacggcgaccgctggatcgaaatttggaactgcgtgtttatgcagttcaaccgcgacgaacaaggcaatatgaacccgctgcccaagccgtccgtcgataccggtatgggtttggaacgtatggcggcagtaatgcagcacgttcacagcaactacgaaatcgacttgttccaagacctgctcaaagccgtcgcccgcgaaaccggcgcgccgttcagtatggacgagccgagcctgaaagtcatcgccgaccacatccgctcctgctccttcctgattgcagacggcgtgttgcctgccaacgaaggacgcggctacgtattgcgccgcatcatccgccgcgccgtgcgccacggttacaaactgggtcaaagcaaaccgttsttccacaaactcgttgccgatttggttaaagagatgggcggtgcctaccctgaattgaaagaaaaacaggcacaaatcgaagaagccttgaaaaacgaagaaagccgttttgcccaaactttggaaaccggtatggctttgttggaaaacgcgttggccaaaggcggcaaaacactcggcggcgaaatcatcttcaaactctacgatacctacggtttcccatacgacctgactgccgacatctgccgcgaacgcaatatcgaaccggacgaagcaggcttcgagcgcgaaatggaagcacaacgcgcacgcgcacgcgccgcacaaagcttcaaagccaatgcccaactgccttacgaaggtcaagacaccgagtttaaaggttatagcgaacgccaaaccgaagccaaagtcctcgcactctacaaaaacggcgagcaagtcaacgaattgaacgaaggcgacagcggcgcagtcgtcatcgactttaccccgttctatgcagaatccggcggccaagtcggcgatgtcggctatatcttctcaggcgaaaaccgctttgaagtacgcgatacccaaaaaatcaaagcggccgtattcggacaattcggcgtacaaacttcaggccgtctgaaagtcggcgacagcgttaccgccaaagtagatgacgaaatccgcaaagcnaatatngcacnnagcncgacccaccttatgnacaaagccttgcgcgacgtattgggtggacacgtcgaacaaaaaggctctttggttaccncngaatccacccggttcgacatttcccatcctcaagcagtcactgcggaagaaatcgcgaaagtcgaacgccgcgtcaacgaagccgttttagcgaacgtttccgtcaacgccgccattatgagtatggaggacgcgcaaaaaaccggcgcgatgatgctcttcggcgaaaaatacggcgatgaagtgcgcgtactgcaaatgggcggtttctctaccgaattgtgcggcggcacacacgtttcacgcaccggcgacatcggcctcttcaaaatcatcagcgaaggcggtattgccgcaggcgtgcgccgtatngaagccatcaccggcttgaacgcactcaaatgggcgcaagagcaagaacgcttggtgaaagacattattgccgaaaccaaagcccaaaccgaaaaagacgtactggcgaaaatccaagcaggcgcggcacacgccaaagcattggaaaaagaattggcacgcgccaaagccgaacttgccgtccacgcaggcgcaaaactcttggacgatgcaaaagacttgggcgcagccaaactcgttgccgcccaaatcgaagccgacgcagccgccctgcgcgaaatcgtaaccgacctgaccggcaaatcagaacaagccntcgtattgctcgccgcagtaaacgacggcaaagtctccctgtgcgccggcgtatccaaaccgttgaccggcaaagtcaaagcaggcgat

SEQ ID NO: 48 - protein, 791 aa, Neisseria lactamica
  misc_feature (86)..(86): The 'Xaa' at location 86 stands for Pro.
  misc_feature (293)..(293): The 'Xaa' at location 293 stands for Leu, or Phe.
  misc_feature (523)..(523): The 'Xaa' at location 523 stands for Ile, or Met.
  misc_feature (525)..(525): The 'Xaa' at location 525 stands for Gln, His, Arg, Pro, or Leu.
  misc_feature (527)..(527): The 'Xaa' at location 527 stands for Thr, Ala, Pro, or Ser.
  misc_feature (532)..(532): The 'Xaa' at location 532 stands for Asn, Asp, His, or Tyr.
  misc_feature (552)..(552): The 'Xaa' at location 552 stands for Thr, Ala, Pro, or Ser.
  misc_feature (656)..(656): The 'Xaa' at location 656 stands for Ile, or Met.
  misc_feature (762)..(762): The 'Xaa' at location 762 stands for Ile, Val, Leu, or Phe.
  misc_feature (1563)..(1563): undetermined base
  misc_feature (1569)..(1569): undetermined base
  misc_feature (1574)..(1575): undetermined bases
  misc_feature (1579)..(1579): undetermined base
  misc_feature (1594)..(1594): undetermined base
  misc_feature (1654)..(1654): undetermined base
  misc_feature (1656)..(1656): undetermined base
  misc_feature (1968)..(1968): undetermined base
  misc_feature (2284)..(2284): undetermined base
FTNAGMNQFKDVFLGFDKRPYSRATTAQKCVRAGGKHNDLENVGYTARHHTFFEMMGNFSFGDYFKRDAIHFAWEFLTSPEWFNIXKDKLLATVYAEDDEAYNIWLNEIGMPSERIVRIGDNKGAKYASDNFWQMGDTGPCGPCSEIFYDHGEEIWGGIPGSPEEDGDRWIEIWNCVFMQFNRDEQGNMNPLPKPSVDTGMGLERMAAVMQHVHSNYEIDLFQDLLKAVARETGAPFSMDEPSLKVIADHIRSCSFLIADGVLPANEGRGYVLRRIIRRAVRHGYKLGQSKPXFHKLVADLVKEMGGAYPELKEKQAQIEEALKNEESRFAQTLETGMALLENALAKGGKTLGGEIIFKLYDTYGFPYDLTADICRERNIEPDEAGFEREMEAQRARARAAQSFKANAQLPYEGQDTEFKGYSERQTEAKVLALYKNGEQVNELNEGDSGAVVIDFTPFYAESGGQVGDVGYIFSGENRFEVRDTQKIKAAVFGQFGVQTSGRLKVGDSVTAKVDDEIRKANXAXSXTHLMXKALRDVLGGHVEQKGSLVTXESTRFDISHPQAVTAEEIAKVERRVNEAVLANVSVNAAIMSMEDAQKTGAMMLFGEKYGDEVRVLQMGGFSTELCGGTHVSRTGDIGLFKIISEGGIAAGVRRXEAITGLNALKWAQEQERLVKDIIAETKAQTEKDVLAKIQAGAAHAKALEKELARAKAELAVHAGAKLLDDAKDLGAAKLVAAQIEADAAALREIVTDLTGKSEQAXVLLAAVNDGKVSLCAGVSKPLTGKVKAGD

SEQ ID NO: 49 - DNA, 2622 bp, Neisseria meningitidis (group B)
  CDS (1)..(2622): protein Q9JYG6
atgaaaacctccgaactgcgccaaaaattcctaaaattttttgaaaccaaaggccacaccgtcgtccgctcttccagcctcgtgccgcacgacgacccgaccctgctgtttaccaacgcgggcatgaaccagtttaaagacgtattcttaggtttcgacaaacgcccgtacagccgcgccaccaccgcgcaaaaatgcgtacgcgcaggcggcaaacacaacgacttggaaaacgtcggctacaccgcccgccaccacaccttctttgaaatgatgggcaacttctccttcggcgactacttcaaacgcgacgccatccacttcgcttgggaatttctgacttcccccgaatggctcaacatccctaaagacaaactgttggcgaccgtttacgcggaagacgacgaagcctacaacatctggttgaacgaaatcggtatgccgtccgagcgcatcgtccgcatcggcgacaacaaaggcgcgaaatacgcatccgacaacttctggcaaatgggcgacaccggcccttgcggcccctgctccgaaattttctacgaccacggcgaagaaatctggggcggcattcccggcagtcccgaagaagacggcgaccgctggatcgaaatttggaactgcgtatttatgcagttcaaccgcgacgaacaaggcaatatgaacccgcttcccaaaccttccgtcgataccggtatgggcttggaacgcatagccgccgtcatgcagcatgttcacagcaactacgaaatcgacttgttccaagacctgctcaaagccgttgcccgcgaaaccggcgcgccgttcagaatggaagaacccagcctgaaagtcatcgccgaccacatccgctcctgctcgttcctgattgcagacggcgtcttgccttccaacgaaggccgcggctacgtattgcgccgcattatccgccgcgccgtgcgccacggttacaaactgggtcaaagcaaaccgttcttccacaaactcgttgccgatttggtcaaagagatgggcggtgcctaccctgaattgaaagaaaaacaagcccaaatcgaagaagcattgaaaaacgaagaaagccgttttgcccaaacgctggaaaccggtatggctttgttggaaaacgcgctggtcaaaggcggcaaaacactcggcggcgaaatcatcttcaaactctacgatacctacggtttcccatacgacttgactgccgacatctgccgcgaacgcaatatcgaaccggacgaagcaggcttcgagcgcgaaatggaagcccaacgcgcacgcgcacgcgccgcccaaagcttcaaagccaacgcccaactgccttatgacggtcaagacaccgagtttaaaggttatagcgaacgccaaaccgaatccaaagtcctcgccctctacaaagacggcgagcaagtcaacgaattgaacgaaggcgacagcggcgcagtcgtcatcgactttaccccgttctatgcagaatccggcggccaagtcggcgatgtcggctatatcttctcaggcgaaaaccgctttgaagtacgcgatacccaaaaaatcaaagcggccgtattcggtcaattcggcgtacaaacttcaggccgtctgaaagtcggcgacagcgttaccgccaaagtggacgacgaaatccgcaatgccaatatgcgcaaccacagcgcaacccacttgatgcacaaagccctgcgcgatgtattgggcagacacgtcgaacaaaaaggctctttggttaccgccgaatccacccgtttcgacatttcccatccccaagcggtaactgccgaagaaattgccgaagtagaacgccgcgtcaacgaagccattttggcgaacgttgccgtcaatgcagccattatgagcatggaagacgcgcaaaaaaccggcgcgatgatgctcttcggcgaaaaatacggcgaagaagtgcgcgtactgcaaatgggcggtttctctaccgaattgtgcggcggcacacacgtttcacgcaccggcgacatcggcctcttcaaaatcatcagcgaaggcggtattgccgcaggcgtgcgccgtatcgaagccatcaccggcctgaacgcactcaaatgggcgcaagagcaagagcgtttggtgaaagacattattgccgaaaccaaagcccaaaccgaaaaagacgtactggcaaaaatccaagcaggcgcggcacacgccaaagcattggaaaaagaattggcacgcgccaaagccgaactcgccgtccacgcaggcgccaaactcttggacgatgcaaaagacttgggcgcagccaaactcgttgccgcccaaatcgaagccgacgcagccgccctgcgcgaaatcgttaccgatttaaccggtaaatccgacaacgccgtgattcttttagcggcagtaaacgacggcaaagtctccctgtgcgccggcgtatccaaaccgttgaccggcaaagtgaaagcaggcgatctggttaaatttgcagccgaacaagtcggcggcaaaggcggcggcagaccagatttggcgcaagccggcggcacggatgccgacaaattgcccgccgtgttggatagcgtgaaagactgggtcggcgcgaagctggtt

SEQ ID NO: 50 - protein, 874 aa, Neisseria meningitidis (group B)
MKTSELRQKFLKFFETKGHTVVRSSSLVPHDDPTLLFTNAGMNQFKDVFLGFDKRPYSRATTAQKCVRAGGKHNDLENVGYTARHHTFFEMMGNFSFGDYFKRDAIHFAWEFLTSPEWLNIPKDKLLATVYAEDDEAYNIWLNEIGMPSERIVRIGDNKGAKYASDNFWQMGDTGPCGPCSEIFYDHGEEIWGGIPGSPEEDGDRWIEIWNCVFMQFNRDEQGNMNPLPKPSVDTGMGLERIAAVMQHVHSNYEIDLFQDLLKAVARETGAPFRMEEPSLKVIADHIRSCSFLIADGVLPSNEGRGYVLRRIIRRAVRHGYKLGQSKPFFHKLVADLVKEMGGAYPELKEKQAQIEEALKNEESRFAQTLETGMALLENALVKGGKTLGGEIIFKLYDTYGFPYDLTADICRERNIEPDEAGFEREMEAQRARARAAQSFKANAQLPYDGQDTEFKGYSERQTESKVLALYKDGEQVNELNEGDSGAVVIDFTPFYAESGGQVGDVGYIFSGENRFEVRDTQKIKAAVFGQFGVQTSGRLKVGDSVTAKVDDEIRNANMRNHSATHLMHKALRDVLGRHVEQKGSLVTAESTRFDISHPQAVTAEEIAEVERRVNEAILANVAVNAAIMSMEDAQKTGAMMLFGEKYGEEVRVLQMGGFSTELCGGTHVSRTGDIGLFKIISEGGIAAGVRRIEAITGLNALKWAQEQERLVKDIIAETKAQTEKDVLAKIQAGAAHAKALEKELARAKAELAVHAGAKLLDDAKDLGAAKLVAAQIEADAAALREIVTDLTGKSDNAVILLAAVNDGKVSLCAGVSKPLTGKVKAGDLVKFAAEQVGGKGGGRPDLAQAGGTDADKLPAVLDSVKDWVGAKLV

SEQ ID NO: 51 - DNA, 777 bp, Neisseria lactamica
  CDS (1)..(777): Na+ translocating NADH quinone reductase subunit C
atggctaagaaattcgataaagacagcttcagcggcacgctgattgtcgtggtggcggtcagcctgatttgctcggtcattgttgccggtgcggtcgtcggcttaaaacccatccaagaaaaacaaaaactccaagacaaacaaggctatatcttgagcgtagccggtttgatggataaagacaccgacatcggcaaaacctttgccgagcgtatcgagcaacgtgtggtcgatttggcgaccggcgaatatgtgaaagacgcgccgaaagacttcagcgcacgcgttgccggcaaagaccccgcgcaaagcatccgcatcaaacccgaagacgattcggcaggcatcaaaagccgtgccaaatacaccgaggtttatttggtaaaaggtgaagacggaaaatcgggcaaaatcatcctgcctatgcacggcaacggtttgtggtctgttatgtacggttttgtcgcaatccaacccgacggcaacaccatcaacggcattacctactacgagcaaggggaaaccccgggcttgggcggcgaaatcggcaatcctttgtggcagcaaaaattcgtcgggaaaaaactgtttgacggacaaggcaaactcgccctgaacgtcggcaaaggcgcgggttcggacaaagaacacggsgtagattggctctccggcgcgttgytgacatccaaaggcgttcaagggtccttcgactactggttcggcgaaaacggstatattccctacctgaacaaattgaaatcagcaggagcgcaataa

SEQ ID NO: 52 - protein, 258 aa, Neisseria lactamica
  misc_feature (218)..(218): The 'Xaa' at location 218 stands for Gly.
  misc_feature (227)..(227): The 'Xaa' at location 227 stands for Leu.
  misc_feature (244)..(244): The 'Xaa' at location 244 stands for Gly.
MAKKFDKDSFSGTLIVVVAVSLICSVIVAGAVVGLKPIQEKQKLQDKQGYILSVAGLMDKDTDIGKTFAERIEQRVVDLATGEYVKDAPKDFSARVAGKDPAQSIRIKPEDDSAGIKSRAKYTEVYLVKGEDGKSGKIILPMHGNGLWSVMYGFVAIQPDGNTINGITYYEQGETPGLGGEIGNPLWQQKFVGKKLFDGQGKLALNVGKGAGSDKEHXVDWLSGALXTSKGVQGSFDYWFGENXYIPYLNKLKSAGAQ

SEQ ID NO: 53 - DNA, 774 bp, Neisseria meningitidis
  CDS (1)..(774): protein Q9JVQ0
atggctaagaaattcgataaagacagcttcagcggcacgctgattgtcgtgttggcggtcagcctgatttgctcggtcatcgttgccggtgcggtcgtcggcttgaaacccatccaagagaaacaaaaactccaagacaaacaaggctatatcttgagcgtagccggtttgatggataaggacaccgacatcggtaaaacttttgccgagcgtatcgagcaacgcgtggtcgatttggcgaccggcgaatatgtgaaagacgcgccgaaagacttcagtgcgcgcatcgcaggcaaagaccccgcgcaaagcatccgcatcaaacccgaagacgatttggcaggcatcaaaagccgtgccaaatacaccgaggtttacttggtaaaaggtgaagacggcaaaatcggccaaatcatcctgcctatgcacggtaacggtttgtggtcggtcatgtacggctttgtcgccatccaacccgacggcaacaccatcaacggcattacctactacgagcaaggcgaaaccccgggcttaggcggcgaaatcggcaatcctttgtggcagcaaaaattcgtcggcaaaaaactgtttgacggacaaggcaaactcgccctgcacgtcggcaaaggcgcgggttcggacaaagaacacggcgtagatgccctctccggcgcgtcgctgacatccaaaggcgtacaaggttcgttcgcctactggttcggcgaaaacggctatatcccctacctgaacaaattgaaatcagcaggagcgcaa

SEQ ID NO: 54 - protein, 258 aa, Neisseria meningitidis
MAKKFDKDSFSGTLIVVLAVSLICSVIVAGAVVGLKPIQEKQKLQDKQGYILSVAGLMDKDTDIGKTFAERIEQRVVDLATGEYVKDAPKDFSARIAGKDPAQSIRIKPEDDLAGIKSRAKYTEVYLVKGEDGKIGQIILPMHGNGLWSVMYGFVAIQPDGNTINGITYYEQGETPGLGGEIGNPLWQQKFVGKKLFDGQGKLALHVGKGAGSDKEHGVDALSGASLTSKGVQGSFAYWFGENGYIPYLNKLKSAGAQ

SEQ ID NO: 55 - DNA, 399 bp, Neisseria lactamica
  CDS (1)..(399): Na+ translocating NADH quinone reductase subunit D
  misc_feature (399)..(399): undetermined base
atggctgatatgaaacgcttgaaacatttgatgttttcasccttgtatcgacragcaacccgatkgccttgcaggttttgggtatttgttcggctttggcggttaccaccaatacttcagacggccatcgtgatgggtatttccgtcagtttggtaaccggtttttccagcttcttcatttcgctggtacgcaactacatccccaacagcatccgcatcatcgtgcaaatggcgattatcgcgtcgctggttacgctggtcgaccagctcttgcaggcatttgcctacgaattgtccaaacagctttccgtattcgtcggcctgattattaccaactgtatcgtgatgggccgcgccgaagcatttgcgatgaaagagccgccgctggaaagcctgatn

SEQ ID NO: 56 - protein, 133 aa, Neisseria lactamica
  misc_feature (14)..(14): The 'Xaa' at location 14 stands for Ala, or Pro.
  misc_feature (18)..(18): The 'Xaa' at location 18 stands for Arg, or Gln.
  misc_feature (22)..(22): The 'Xaa' at location 22 stands for Trp, or Leu.
  misc_feature (133)..(133): The 'Xaa' at location 133 stands for Ile, or Met.
  misc_feature (399)..(399): undetermined base
MADMKRLKHLMFSXLYRXATRXPCRFWVFVRLWRLPPILQTAIVMGISVSLVTGFSSFFISLVRNYIPNSIRIIVQMAIIASLVTLVDQLLQAFAYELSKQLSVFVGLIITNCIVMGRAEAFAMKEPPLESLX

SEQ ID NO: 57 - DNA, 624 bp, Neisseria meningitidis
  CDS (1)..(624): protein Q9JVQ1
atggctgatatgaaacgcttgaaacatttgatgttttcaccctttatcgacaacaacccgattgccttgcaggttttgggtatttgttcggctttggcggttaccaccaaacttcagacggccatcgtgatgggtatttccgtagctttggtaaccggtttttccagcttcttcatttcgctggtacgcaactacatccccaacagcatccgcatcatcgtgcaaatggcgattatcgcgtcgctggttacgctggtcgaccaactcttgcaggcatttgcctacgaattgtccaaacagctttccgtattcgtcggtctgattattaccaactgtatcgtgatgggccgcgccgaagcatttgcgatgaaagagccgccgctggaaagcctgatcgacggcatcggcaacggcgcgggctacgggatgatgctgcttgtcgtcgccaccgtccgcgaactgattggctcgggcaaactcttgggctacaccgttttccaaaccgtgcaggacggcggctggtatcagaccaacggcttgttcctgctcgcccccagcgcgttcttcatcatcggctttttgatttggggactgcgtacctggaaacccgaacaggcggaggaa

SEQ ID NO: 58 - protein, 208 aa, Neisseria meningitidis
MADMKRLKHLMFSPFIDNNPIALQVLGICSALAVTTKLQTAIVMGISVALVTGFSSFFISLVRNYIPNSIRIIVQMAIIASLVTLVDQLLQAFAYELSKQLSVFVGLIITNCIVMGRAEAFAMKEPPLESLIDGIGNGAGYGMMLLVVATVRELIGSGKLLGYTVFQTVQDGGWYQTNGLFLLAPSAFFIIGFLIWGLRTWKPEQAEE

SEQ ID NO: 59 - DNA, 462 bp, Neisseria lactamica
  CDS (1)..(462)
  misc_feature (105)..(105): undetermined base
  misc_feature (320)..(320): undetermined base
ggaaagctggatcacgcgggcggcgtggtcgaaatgttgaaaacgcataaggtccccatcctcgggccgccccgcgaagatgaattcctgctccaatcgctgcsnsaaaccascgsgcaatacggatttcccgtctcgcccgcattttcgccgaaccgttggctcgaagaaggcgaaacgctcgcggtcggacgctatgcctttcaagtgctgcatattccgggccatacgccgggacatatcgtcttttattgtgccgaagcggaattactgattgcgggcgamgtgctgttttacgaaaccataggcagaaccgattntccgcggggcaaccacgccgacttaatcaataatatccgcaaacaaattgattcacccctccccgaaaccgttgcarttkttgccgracacgggcgtatgamttccatcggammggaaaaacggsaaaatccgtttttctaa

SEQ ID NO: 60 - protein, 153 aa, Neisseria lactamica
  misc_feature (35)..(35): The 'Xaa' at location 35 stands for Arg, or Pro.
  misc_feature (36)..(36): The 'Xaa' at location 36 stands for Glu, or Gln.
  misc_feature (38)..(38): The 'Xaa' at location 38 stands for Ser, or Thr.
  misc_feature (39)..(39): The 'Xaa' at location 39 stands for Gly, or Ala.
  misc_feature (95)..(95): The 'Xaa' at location 95 stands for Glu, or Asp.
  misc_feature (107)..(107): The 'Xaa' at location 107 stands for Tyr, Cys, Ser, or Phe.
  misc_feature (133)..(133): The 'Xaa' at location 133 stands for Val, or Ile.
  misc_feature (134)..(134): The 'Xaa' at location 134 stands for Val, or Phe.
  misc_feature (136)..(136): The 'Xaa' at location 136 stands for Gly, or Glu.
  misc_feature (141)..(141): The 'Xaa' at location 141 stands for Asn, or Thr.
  misc_feature (145)..(145): The 'Xaa' at location 145 stands for Lys, Thr, Gln, or Pro.
  misc_feature (149)..(149): The 'Xaa' at location 149 stands for Glu, or Gln.
  misc_feature (105)..(105): undetermined base
  misc_feature (320)..(320): undetermined base
GKLDHAGGVVEMLKTHKVPILGPPREDEFLLQSLXXTXXQYGFPVSPAFSPNRWLEEGETLAVGRYAFQVLHIPGHTPGHIVFYCAEAELLIAGXVLFYETIGRTDXPRGNHADLINNIRKQIDSPLPETVAXXAXHGRMXSIGXEKRXNPFF

SEQ ID NO: 61 - DNA, 630 bp, Neisseria meningitidis
  CDS (1)..(630): protein Q9JWG2
atgaccctacgttacgaaatcctctccgttacccccttccgccaaaactgcaccctgatttgggacgacgaaagcggcgaagccgtcctgaccgatgtcggcggcgacgtgccgttcctgctgcaagcgttggcaaaccgcaaacttacgctcacggcaatctggctgacgcacggccatctcgatcacgcgggcggcgtggtcgaaatgttgaaaacgcataaagtccctgtcctcgggccgcatccggacgatgaattcctgctccaatcgctgccgcaaaccaccgcgcaatacggatttcctgtctcgcccgcctttgcgccgaaccgttggctcgaagaaggcgaaacgctcacggtcggacgctatgcctttcaagtgctgcatattccgggccatacgccgggacatatcgtcttttattgtgccgaggcggaattgctgattgcgggcgacgtgctgttttacgaaaccataggcagaaccgattttccgcgcggcaaccacgccgacttaatcaataatatccgcaacaaattattcgccctccccgaaaccgtgcaagttgtcgccggacacgggcgtatgacttccatcggacacgaaaaacggcacaatccgtttttc

SEQ ID NO: 62 - protein, 210 aa, Neisseria meningitidis
MTLRYEILSVTPFRQNCTLIWDDESGEAVLTDVGGDVPFLLQALANRKLTLTAIWLTHGHLDHAGGVVEMLKTHKVPVLGPHPDDEFLLQSLPQTTAQYGFPVSPAFAPNRWLEEGETLTVGRYAFQVLHIPGHTPGHIVFYCAEAELLIAGDVLFYETIGRTDFPRGNHADLINNIRNKLFALPETVQVVAGHGRMTSIGHEKRHNPFF

SEQ ID NO: 63 - DNA, 2814 bp, Neisseria lactamica
  CDS (1)..(2814): haemagglutinin/haemolysin related protein
  misc_feature (384)..(384): unidentified base
  misc_feature (391)..(391): unidentified base
  misc_feature (552)..(552): unidentified base
  misc_feature (619)..(619): unidentified base
  misc_feature (622)..(622): unidentified base
  misc_feature (664)..(664): unidentified base
  misc_feature (675)..(675): unidentified base
  misc_feature (1555)..(1555): unidentified base
  misc_feature (1558)..(1558): unidentified base
  misc_feature (1561)..(1561): unidentified base
  misc_feature (1564)..(1564): unidentified base
  misc_feature (1567)..(1567): unidentified base
  misc_feature (1570)..(1570): unidentified base
  misc_feature (1573)..(1573): unidentified base
  misc_feature (1576)..(1576): unidentified base
  misc_feature (1579)..(1579): unidentified base
  misc_feature (1603)..(1603): unidentified base
  misc_feature (1648)..(1648): unidentified base
  misc_feature (1827)..(1827): unidentified base
  misc_feature (2279)..(2279): unidentified base
  misc_feature (2280)..(2280): unidentified base
  misc_feature (2282)..(2283): unidentified base
  misc_feature (2298)..(2298): unidentified base
  misc_feature (2313)..(2313): unidentified base
  misc_feature (2301)..(2301): unidentified base
gatccacgctttgccaactaccgtcaatggttgggtagtgactatatgctgggcagcctcaaactagacccaaacaatttacataaacgtttgggtgatggttattacgagcaacgtttaatcaatgaacaaatcgcagagctgacagggcatcgtcgtttagacggttatcaaaacgacgaagaacaatttaaagccttaatggataatggcgcgactgcggcacgttcgatgaatctcagcgttggcattgcattaagtgccgagcaagtagcgcaactgaccggcgatattgtttggttggtacaaaaagaagttaaacttcctgatggcggcacacaaaccgtattggtgccacaggtttatgtacgcgttaaaaatggngacatanacggtaaaggtgcattgttgtcaggcagcaatacacaaatcaatgtttcaggcagcctgaaaaactcaggcacgattgcagggcgcaatgcgcttattatcaataccgatacgctagacaatatcggtgggcgtattcatgcgcaaaaatcagcggttacngccacacgagacatcaataatattggcggcatgctttctgccgaacagacattattgctcaacgcangcnacaacatcaacagccaaagcaccaccgccagcagtcaaaatncacaaggcagnagcacctacctagaccgaatggcaggtatttatatcacaggcaaagaaaaaggtgttttagcagcgcaggcaggcaaagacatcaacatcatcgccggtcaaatcarcmatcaatcagagcaagggcmaacccggstgcagacaggacscgacattaacctggatacggtacaagccggcaaacatcaagcaaccyattttgatgccgataaccatgttattcgcggttcaacgaacgaagtcggcagcagcattcaraywaaaggcgatgttaccctattgtcagggaataacctcaaygccrrarctkycgaagtcggcagcgcaaacggcacactcgctgtgtctgccaaaaatgacatcaacatcagcgcaggcatcaacacgacccatgttgatggtgcgtccaaacatacaggcagaagcggcggcggtaataaattgattattaccgacaaagcccagagccataacgaaactgcccaaagcagcacctttgaaggcaagcaagttgtattgcaggcaggaaacgatgccaacatccttggcagcaatgttatttccgataatggcacccggattcaagcaggcaatcatgttcgcattggtacaacccaaactcaaagccaaagcgaaacctatcatcaaacccagaaatcaggattgatgagcgcaggtatcggcttcactattggcagcaagacaaacacacaagaaaaccaatcccaaagcaacgaacatacaggcagtaccgtaggcagcctgaaaggcgataccaccattgttgcaggcaaacactacgaacaaatcggcagtaccgtttccagtcctgagggcaammaccttatcggcgcgcaaagtatggatattggcgcagcancgnaanccnatnaancanaanacnmccaaamctatgaacaaaaaggyntwacsgtggcattcagttgccccgktaccgatttggcacaacaancgattgccgtagcacaaagcagcaaacaagtcggacaaagccaaaaaaacgaccgtgtcamtgccatggccgstgccaatgcaggctggcaagcctatcaaacaggtaagagtgcacaaaacttagccaaaggtacaaccaatgccaaacaagtcagcatctccataacctacggcgancagcaaaaccgacaaactacccaagttcaagcaagccaagcccaagcgagtcaaattcaagcaggcggcaaaaccacattaatcgccacaggcgcagcagaacaatccaatatcaacatcgcaggctcagatgttgccggcaaagcaggcacaatcctgattgccgataacgacatcacacttcaatcagccgagcaaagcaataccgaacgcagccaaaacaaatcggcaggttggaacgcaggtgctgccgtatcattcggacaaggaggctggtcattaggcgttaccgcaggcggcaatgtcggcaaaggctacggcaatggcgacagcatcacccaccgccatagccatatcggcgacaaaggcagccaaacccttatccaaagcggtgtcgacactaccatcaaaggcgcgcaagtacgcggcaaaggggtacaagtcaatgccannannctaagcattcaaagngtncaagatagaganctttatcaaagcaaacaacaaaacgccggtgcacaagtgaccgtaggttatggcttcagtgccggtggcgattacagtcaaagcaaaatccgagccgaccatgcttcagtaaccgagcaaagcggtatttatgccggagaagacggctatcaaatcaaggtcggaaaccatacagacctcaaaggcagcattatcaccagtagccaaagcgcagaagacaagggtaaaaaccgctttcagacggccacccttactgccagagacattcaaaaccacagccaatacaaaggcgaaagttttggattgggcgcaagtgcgtccataagcggcaaaacactgggacagggagcacaaaataaacctcaaaacaaacacctgacaagcgtagccgataaaaacggcgcaagttcatcagtgggttacggcagcgacagcgacagtcaaagcagcatcacaaaaagcggcatcaacacccgcaacatacacatcaccgacgaagcg

SEQ ID NO: 64 - protein, 938 aa, Neisseria lactamica
  misc_feature (131)..(131): The 'Xaa' at location 131 stands for Asn, Asp, His, or Tyr.
  misc_feature (184)..(184): The 'Xaa' at location 184 stands for Thr.
  misc_feature (207)..(207): The 'Xaa' at location 207 stands for Ser, Gly, Arg, or Cys.
  misc_feature (208)..(208): The 'Xaa' at location 208 stands for Asn, Asp, His, or Tyr.
  misc_feature (222)..(222): The 'Xaa' at location 222 stands for Thr, Ala, Pro, or Ser.
  misc_feature (225)..(225): The 'Xaa' at location 225 stands for Arg, or Ser.
  misc_feature (261)..(261): The 'Xaa' at location 261 stands for Ser, or Asn.
  misc_feature (262)..(262): The 'Xaa' at location 262 stands for Asn, or His.
  misc_feature (268)..(268): The 'Xaa' at location 268 stands for Gln, or Pro.
  misc_feature (271)..(271): The 'Xaa' at location 271 stands for Val, or Leu.
  misc_feature (275)..(275): The 'Xaa' at location 275 stands for Arg, or Pro.
  misc_feature (291)..(291): The 'Xaa' at location 291 stands for His, or Tyr.
  misc_feature (312)..(312): The 'Xaa' at location 312 stands for Thr, or Ile.
  misc_feature (327)..(327): The 'Xaa' at location 327 stands for Gly, Glu, Arg, or Lys.
  misc_feature (328)..(328): The 'Xaa' at location 328 stands for Ala, or Thr.
  misc_feature (329)..(329): The 'Xaa' at location 329 stands for Ala, Val, Ser, or Phe.
  misc_feature (505)..(505): The 'Xaa' at location 505 stands for Lys, or Asn.
  misc_feature (506)..(506): The 'Xaa' at location 506 stands for Asn, or His.
  misc_feature (519)..(519): The 'Xaa' at location 519 stands for Thr, Ala, Pro, or Ser.
  misc_feature (520)..(520): The 'Xaa' at location 520 stands for Lys, Glu, Gln, or a stop cod on.
  misc_feature (521)..(521): The 'Xaa' at location 521 stands for Thr, Ala, Pro, or Ser.
  misc_feature (522)..(522): The 'Xaa' at location 522 stands for Asn, Asp, His, or Tyr.
  misc_feature (523)..(523): The 'Xaa' at location 523 stands for Lys, Glu, Gln, or a stop cod on.
  misc_feature (524)..(524): The 'Xaa' at location 524 stands for Thr, Ala, Pro, or Ser.
  misc_feature (525)..(525): The 'Xaa' at location 525 stands for Lys, Glu, Gln, or a stop cod on.
  misc_feature (526)..(526): The 'Xaa' at location 526 stands for Asn, Asp, His, or Tyr.
  misc_feature (527)..(527): The 'Xaa' at location 527 stands for Asn, Thr, Asp, Ala, His, Pro , Tyr, or Ser.
  misc_feature (529)..(529): The 'Xaa' at location 529 stands for Asn, or Thr.
  misc_feature (534)..(534): The 'Xaa' at location 534 stands for Gly.
  misc_feature (535)..(535): The 'Xaa' at location 535 stands for Ile, Val, Leu, or Phe.
  misc_feature (536)..(536): The 'Xaa' at location 536 stands for Thr.
  misc_feature (543)..(543): The 'Xaa' at location 543 stands for Gly, or Val.
  misc_feature (550)..(550): The 'Xaa' at location 550 stands for Thr, Ala, Pro, or Ser.
  misc_feature (570)..(570): The 'Xaa' at location 570 stands for Asn, or Thr.
  misc_feature (574)..(574): The 'Xaa' at location 574 stands for Gly, or Ala.
  misc_feature (609)..(609): The 'Xaa' at location 609 stands for Glu, or Asp.
  misc_feature (760)..(760): The 'Xaa' at location 760 stands for Lys, Asn, Arg, Ser, Thr, Ile , or Met.
  misc_feature (761)..(761): The 'Xaa' at location 761 stands for Lys, Asn, Arg, Ser, Thr, Ile , or Met.
  misc_feature (766)..(766): The 'Xaa' at location 766 stands for Arg, or Ser.
  misc_feature (771)..(771): The 'Xaa' at location 771 stands for Glu, or Asp.
  misc_feature (384)..(384): unidentified base
  misc_feature (391)..(391): unidentified base
  misc_feature (552)..(552): unidentified base
  misc_feature (619)..(619): unidentified base
  misc_feature (622)..(622): unidentified base
  misc_feature (664)..(664): unidentified base
  misc_feature (675)..(675): unidentified base
  misc_feature (1555)..(1555): unidentified base
  misc_feature (1558)..(1558): unidentified base
  misc_feature (1561)..(1561): unidentified base
  misc_feature (1564)..(1564): unidentified base
  misc_feature (1567)..(1567): unidentified base
  misc_feature (1570)..(1570): unidentified base
  misc_feature (1573)..(1573): unidentified base
  misc_feature (1576)..(1576): unidentified base
  misc_feature (1579)..(1579): unidentified base
  misc_feature (1603)..(1603): unidentified base
  misc_feature (1648)..(1648): unidentified base
  misc_feature (1827)..(1827): unidentified base
  misc_feature (2279)..(2279): unidentified base
  misc_feature (2280)..(2280): unidentified base
  misc_feature (2282)..(2283): unidentified base
  misc_feature (2298)..(2298): unidentified base
  misc_feature (2313)..(2313): unidentified base
  misc_feature (2301)..(2301): unidentified base
DPRFANYRQWLGSDYMLGSLKLDPNNLHKRLGDGYYEQRLINEQIAELTGHRRLDGYQNDEEQFKALMDNGATAARSMNLSVGIALSAEQVAQLTGDIVWLVQKEVKLPDGGTQTVLVPQVYVRVKNGDIXGKGALLSGSNTQINVSGSLKNSGTIAGRNALIINTDTLDNIGGRIHAQKSAVXATRDINNIGGMLSAEQTLLLNAXXNINSQSTTASSQNXQGXSTYLDRMAGIYITGKEKGVLAAQAGKDINIIAGQIXXQSEQGXTRXQTGXDINLDTVQAGKHQATXFDADNHVIRGSTNEVGSSIQXKGDVTLLSGNNLNAXXXEVGSANGTLAVSAKNDINISAGINTTHVDGASKHTGRSGGGNKLIITDKAQSHNETAQSSTFEGKQVVLQAGNDANILGSNVISDNGTRIQAGNHVRIGTTQTQSQSETYHQTQKSGLMSAGIGFTIGSKTNTQENQSQSNEHTGSTVGSLKGDTTIVAGKHYEQIGSTVSSPEGXXLIGAQSMDIGAAXXXXXXXXXQXYEQKXXXVAFSCPXTDLAQQXIAVAQSSKQVGQSQKNDRVXAMAXANAGWQAYQTGKSAQNLAKGTTNAKQVSISITYGXQQNRQTTQVQASQAQASQIQAGGKTTLIATGAAEQSNINIAGSDVAGKAGTILIADNDITLQSAEQSNTERSQNKSAGWNAGAAVSFGQGGWSLGVTAGGNVGKGYGNGDSITHRHSHIGDKGSQTLIQSGVDTTIKGAQVRGKGVQVNAXXLSIQXVQDRXLYQSKQQNAGAQVTVGYGFSAGGDYSQSKIRADHASVTEQSGIYAGEDGYQIKVGNHTDLKGSIITSSQSAEDKGKNRFQTATLTARDIQNHSQYKGESFGLGASASISGKTLGQGAQNKPQNKHLTSVADKNGASSSVGYGSDSDSQSSITKSGINTRNIHITDEA

SEQ ID NO: 65 - DNA, 7542 bp, Neisseria meningitidis (group B)
  CDS (1)..(7542): protein Q9JY30
atgaataaaactctctatcgtgtaattttcaaccgcaaacgtggggctgtggtagccgttgctgaaactaccaagcgcgaaggtaaaagctgtgccgatagtgattcaggcagcgctcatgtgaaatctgttccttttggtactactcatgcacctgtttgtcgttcaaatatcttttctttttctttattgggcttttctttatgtttggctgtaggtacggccaatattgcttttgctgatggcattattgctgataaagctgctcctaaaactcaacaagccacgattctgcaaacaggtaacggcataccgcaagtcaatattcaaacccctacttcggcaggggtttctgttaatcaatacgcccagtttgatgtgggtaatcgcggggcgattttaaacaacagccgcagcaacacccaaacacagctaggcggttggattcaaggtaatccttggttggcaaggggcgaagcacgtgtggttgtaaaccaaatcaacagcagccattcttcacaaatgaatggctatattgaagtgggcggacgacgtgcagaagtcgttattgccaatccggcagggattgcagtcaatggtggtggttttatcaatgcttcccgtgccactttgacgacaggccaaccgcaatatcaagcaggagaccttagcggctttaagataaggcaaggcaatgttgtaatcgccggacacggtttggatgcccgtgataccgatttcacacgtattctcagttatcattccaaaattgatgcacccgtatggggacaagatgttcgtgtcgtcgcgggacaaaacgatgtggtcgcaacaggtaatgcacattcgcctattctcaataatgctgctgccaatacgtcaaacaatacagccaacaacggcacacatatccctttatttgcgattgatacaggcaaattaggaggtatgtatgccaacaaaatcaccttgatcagtacggccgagcaagcaggcattcgtaatcaagggcagttgtttgcttcttccggtaatgtggcgattgatgcaaatggccgtttagtcaatagtggcacgatggctgccgccaatgcgaaagatacggataatacagcggaacacaaagtcaatatccgcagtcagggcgttgaaaacagcggtacggcggtatcgcaacaaggcactcaaattcacagtcagtcgattcaaaacactggcacattattgtcctcaggcgaaatattgattcacaattcgggcagcctgaaaaatgaaacatcaggcaccattgaagccgctcgtttggctattgataccgacacacttaataatcaaggcaaactctctcaaacaggttcacaaaaactccatattgatgcacaaggcaaaatggataaccgtggccgcatgggtttacaagataccgcaccaaccgcgtcaaatggttcaagcaatcaaaccggcaatagttacaatgcatctttccattcatccactaccacaccaacaacggcaacaggtacgggtactgcaaccgtttctatatcaaacataactgcgcctacctttgctgatgggacaattcgcactcatggtgcactggataattcaggcagtattattgccaatggtcaaacagatgttagtgcgcaacaaggtttaaataatgcaggacaaatagacattcatcagttaaatgcaaaaggttcggcgtttgacaatcacaatggaacaattatcagtgatgcggtccacattcaagccggcagcctgaataatcaaaatggcaacatcacaacacgccaacagttagagattgaaaccgatcaactggataacgctcatggcaagttattatcagcagaaatagcggatttagccgtttcaggcagcctgaacaatcaaaatggcgaaatagcgaccaatcaacaactgattattcacgatggtcagcaatctaccgctgtcattgataatacgaatggcacgatacaatcaggccgtgatgttgctattcaggcaaaatcgttatccaacaacggcacacttgccgctgataataaactggatattgcgttacaagatgatttttatgtagaacgcaatatcgtggcgggcaatgaattgtcgctcagtacacgaggcagcctgaaaaattcacatactttgcaagcaggaaaacgcattcggattaaagcaaataaccttgataatgcagcacaaggcaacattcaatccggcggtacgacagacattggcacgcagcacaatttaaccaatagaggcttgattgacggacaacaaaccaaaatccaagccgggcaaatgaataatatcggtacaggtcggatttatggcgacaatatcgctattgcggctacccgcttagacaatcaagatgaaaacggtacaggtgccgccattgcggcacgtgaaaacctgaatttaggcatcggacaattaaacaaccgtgaaaacagtctgatttacagcggtaacgatatggcggttggcggcgcattagataccaatggccaagccacaggcaaagcccaaaggatacacaatgccggcgcaaccattgaagctgcaggcaaaatgcgtttaggtgtagaaaagctgcacaataccaatgagcatttgaaaacgcagttggtagaaacagggcgcgagcatattgttgattacgaagcatttggacgacacgaattattgcgagaaggcacgcaacatgaattaggctggtctgtctataacgatgaatcagaccacttacgcacccctgatggagcggcgcatgaaaattggcataaatacgattatgaaaaagtcacccaaaaaacccaagttacccaaactgcgccagccaaaatcatttcaggtaatgatttaaccattgatggtaaagaagtatttaataccgatagccaaatcattgctggtggcaatctcattgtacaaacagaaaaagacggtttgcataacgagcaaacctttggcgaaaagaaagtattcagtgaaaatggcaaattacacagctattggcgtgagaaacataaaggacgagactcaacgggacatagcgaacaaaattacactttgccggaggaaatcacacgcaacatttcactgggttcatttgcctatgaatcgcatcgcaaagcattaagccatcatgcgcccagccaaggcactgagttgccgcaaagcaacggtatttcgctaccctatacgtccaattcttttaccccattacccagcagcagcttatacattatcaatcctgtcaataaaggctatcttgttgaaaccgatccacgctttgccaactaccgtcaatggttgggtagtgactatatgctggacagcctcaaactagacccaaacaatttacataaacgtttgggtgatggttattacgagcaacgtttaatcaatgaacaaatcgcagagctgacagggcatcgtcgtttagacggttatcaaaacgacgaagaacaatttaaagccttaatggataatggcgcgactgcggcacgttcgatgaatctcagcgttggcattgcattaagtgccgagcaagtagcgcaactgaccagcgatattgtttggttggtacaaaaagaagttaagcttcctgatggcggcacacaaaccgtattggtgccacaggtttatgtacgcgttaaaaatggcgacatagacggtaaaggtgcattgttgtcaggcagcaatacacaaatcaatgtttcaggcagcctgaaaaactcaggcacgattgcagggcgcaatgcgcttattatcaataccgatacgctagacaatatcggtgggcgtattcatgcgcaaaaatcagcggttacggccacacaagacatcaataatattggcggcatgctttctgccgaacagacattattgctcaacgcaggcaacaacatcaacagccaaagcaccaccgccagcagtcaaaatacacaaggcagcagcacctacctagaccgaatggcaggtatttatatcacaggcaaagaaaaaggtgttttagcagcgcaggcaggaaaagacatcaacatcattgccggtcaaatcagcaatcaatcagagcaagggcaaacccggctgcaagcagggcgcgacattaacctagatacggtacaaaccagcaaacatcaagcaacccattttgatgccgataaccatgttattcgcggttcaacgaacgaagtcggcagcagcattcaaacaaaaggcgatgttaccctattgtcagggaataacctcaatgccaaagctgccgaagtcagcagcgcaaacggtacactcgctgtgtctgccaaaaatgacatcaacatcagcgcaggcatcaacacgacccatgttgatgatgcgtccaaacacacaggcagaagcggtggtggcaataaattagtcattaccgataaagcccaaagtcatcacgaaaccgcccaaagcagcacctttgaaggcaagcaagttgtattgcaggcaggaaacgatgccaacatccttggcagcaatgttatttccgataatggcacccagattcaagcaggcaatcatgttcgcattggtacaacccaaactcaaagccaaagcgaaacctatcatcaaacccagaaatcaggattgatgagtgcaggtatcggcttcactattggcagcaagacaaacacacaagaaaaccaatcccaaagcaacgaacatacaggcagtaccgtaggcagcttgaaaggcgataccaccattgttgcaggcaaacactacgaacaaatcggcagtaccgtttccagcccggaaggcaacaataccatctatgcccaaagcatagacattcaagcggcacacaacaaattaaacagtaataccacccaaacctatgaacaaaaaggcctaacggtggcattcagttcgcccgttaccgatttggcacaacaagcgattgccgtagcacaaagcagcaaacaagtcggacaaagcaaaaacgaccgcgttaatgccatggcggctgccaatgcaggctggcaagcctatcaaacaggtaagagtgcacaaaacttagccaatggtacaaccaatgccaaacaagtcagcatctccataacctacggcgaacagcaaaaccgacaaaccacccaagttcaagccaatcaagcccaagcgagtcaaattcaagcaggtggtaaaaccacattaatcgccacaggcgcagcagaacaatccaatatcaacatcgcaggctcagatgttgccggcaaagcaggcacaatcctgattgccgataacgacatcacactccaatcagccgagcaaagcaataccgaacgcggccaaaacaaatcggcaggctggaacgcaggtgctgccgtatcattcggacaaggaggctggtcattaggcgttaccgcaggcggcaatgtcggcaaaggctacggcaatggcgacagcatcacccaccgccatagccatatcggcgacaaaggcagccaaacccttatccaaagcggtggcgacactaccatcaaaggcgcgcaagtacgcggcaaaggcgtacaagtcaatgccaaaaacctaagtattcaaagcgtacaagatagagaaacctatcaaagcaaacaacaaaacgccagtgcacaagttaccgtaggttatggcttcagtgccggtggcgattacagccaaagcaaaatccgagccgaccatgtttcagtaaccgagcaaagcggtatttatgccggagaagacggctatcaaatcaaggtcggaaaccatacagacctcaaaggcggcatcatcaccagtacccaaagcgcagaagacaagggtaaaaaccgctttcagacggccaccctcacccatagcgacatcaaaaaccacagccaatacaaaggcgaaagttttggattgggcgcaagtgcgtccataagcggcaaaacactgggacagggcgcacaaaataaacctcaaaacaaacacctgacaagcgtagccgataaaaacagcgcaagttcatcagtgggttatggcagcgacagcgacagtcaaagcagcatcacaaaaagcggcatcaacacccgcaacattcaaatcaccgacgaagccgcacaaatccggctgacaggcaaaacagcggcacaaaccaaagccgatattgatacaaacgtaaccacagacaccgccgaacgacattcgggcagcttgaagaacaccttcaacaaagaagcggtgcaaagtgaactggatttacaaagaaccgtcagccaagattttagtaaaaatgttcaacaagccaataccgagattaaccaacatttagacaaactcaaagcagacaaagaagcagccgaaacagcagcagccgaggcattagccaatggcgatatggaaactgccaaacgcaaagcccatgaagctcaagatgcggcagcaaaagcagataattggcaacaaggcaaagtcattctcaacatgttagcctcaggtttagctgcgccgacccaaagcggagcgggcatcgctgcggctaccgcatcgccagccgtatcgtatgcgattggacagcactttaaagatttagccggtcaaaacgcgaatggtaaactaaccgccagtcaagaaaccgcacacgttcttgcccacgcggtattaggagcagcggttgccgcagtaggagacaacaatgctctagcaggagcattgagtgcgggcgggtcggaagcggctgcgccttacatcagcaaatggttatacggcaaagaaaaaggaagcgacttaacggcggaagagaaagagactgtaacagcgattacaaatgtattgggtacggctacgggtgcggcagtcggcaacagcgcaacagatgcagcgcaaggcagcctgaatgcgcaaagtgcggtggagaataatgatactgtagagcaagtgaaatttgctcttaggcaccctagaattgctattgcaattggatctgtacataaagatcctggctctacattagagcctaatatttcaacaattgcttcaacttttcaattaaatttatttcctaatagtgaatttggtggtgaaggtggagttggcaatgcattcaggcacgttttatggcaagcaaccatcacacgagaatttggcaaagatattgctgttaaagtaggaaatagtcatgaaagtggggaaaaaattaattattctataagacgtaatctttcattagataaagcagatgaaatgattgatcaactaaataacgaaataggaagagaaatagcattaaataccaataggttaaacacaaaagagttagttggattaattctggaaacttataaaaataatggtttttatcaagcagaaagaaacagtaatggaaattatgatgttgtaagaaaaagattatctgaaaaagattaccagaatacaagcaatatattgattcacttagataatactggtgccggatttaaaattcagcagaggagaaaacaaatcagagcacaaatttcagccagacaatggagaaga

SEQ ID NO: 66 - protein, 2514 aa, Neisseria meningitidis (group B)
MNKTLYRVIFNRKRGAVVAVAETTKREGKSCADSDSGSAHVKSVPFGTTHAPVCRSNIFSFSLLGFSLCLAVGTANIAFADGIIADKAAPKTQQATILQTGNGIPQVNIQTPTSAGVSVNQYAQFDVGNRGAILNNSRSNTQTQLGGWIQGNPWLARGEARVVVNQINSSHSSQMNGYIEVGGRRAEVVIANPAGIAVNGGGFINASRATLTTGQPQYQAGDLSGFKIRQGNVVIAGHGLDARDTDFTRILSYHSKIDAPVWGQDVRVVAGQNDVVATGNAHSPILNNAAANTSNNTANNGTHIPLFAIDTGKLGGMYANKITLISTAEQAGIRNQGQLFASSGNVAIDANGRLVNSGTMAAANAKDTDNTAEHKVNIRSQGVENSGTAVSQQGTQIHSQSIQNTGTLLSSGEILIHNSGSLKNETSGTIEAARLAIDTDTLNNQGKLSQTGSQKLHIDAQGKMDNRGRMGLQDTAPTASNGSSNQTGNSYNASFHSSTTTPTTATGTGTATVSISNITAPTFADGTIRTHGALDNSGSIIANGQTDVSAQQGLNNAGQIDIHQLNAKGSAFDNHNGTIISDAVHIQAGSLNNQNGNITTRQQLEIETDQLDNAHGKLLSAEIADLAVSGSLNNQNGEIATNQQLIIHDGQQSTAVIDNTNGTIQSGRDVAIQAKSLSNNGTLAADNKLDIALQDDFYVERNIVAGNELSLSTRGSLKNSHTLQAGKRIRIKANNLDNAAQGNIQSGGTTDIGTQHNLTNRGLIDGQQTKIQAGQMNNIGTGRIYGDNIAIAATRLDNQDENGTGAAIAARENLNLGIGQLNNRENSLIYSGNDMAVGGALDTNGQATGKAQRIHNAGATIEAAGKMRLGVEKLHNTNEHLKTQLVETGREHIVDYEAFGRHELLREGTQHELGWSVYNDESDHLRTPDGAAHENWHKYDYEKVTQKTQVTQTAPAKIISGNDLTIDGKEVFNTDSQIIAGGNLIVQTEKDGLHNEQTFGEKKVFSENGKLHSYWREKHKGRDSTGHSEQNYTLPEEITRNISLGSFAYESHRKALSHHAPSQGTELPQSNGISLPYTSNSFTPLPSSSLYIINPVNKGYLVETDPRFANYRQWLGSDYMLDSLKLDPNNLHKRLGDGYYEQRLINEQIAELTGHRRLDGYQNDEEQFKALMDNGATAARSMNLSVGIALSAEQVAQLTSDIVWLVQKEVKLPDGGTQTVLVPQVYVRVKNGDIDGKGALLSGSNTQINVSGSLKNSGTIAGRNALIINTDTLDNIGGRIHAQKSAVTATQDINNIGGMLSAEQTLLLNAGNNINSQSTTASSQNTQGSSTYLDRMAGIYITGKEKGVLAAQAGKDINIIAGQISNQSEQGQTRLQAGRDINLDTVQTSKHQATHFDADNHVIRGSTNEVGSSIQTKGDVTLLSGNNLNAKAAEVSSANGTLAVSAKNDINISAGINTTHVDDASKHTGRSGGGNKLVITDKAQSHHETAQSSTFEGKQVVLQAGNDANILGSNVISDNGTQIQAGNHVRIGTTQTQSQSETYHQTQKSGLMSAGIGFTIGSKTNTQENQSQSNEHTGSTVGSLKGDTTIVAGKHYEQIGSTVSSPEGNNTIYAQSIDIQAAHNKLNSNTTQTYEQKGLTVAFSSPVTDLAQQAIAVAQSSKQVGQSKNDRVNAMAAANAGWQAYQTGKSAQNLANGTTNAKQVSISITYGEQQNRQTTQVQANQAQASQIQAGGKTTLIATGAAEQSNINIAGSDVAGKAGTILIADNDITLQSAEQSNTERGQNKSAGWNAGAAVSFGQGGWSLGVTAGGNVGKGYGNGDSITHRHSHIGDKGSQTLIQSGGDTTIKGAQVRGKGVQVNAKNLSIQSVQDRETYQSKQQNASAQVTVGYGFSAGGDYSQSKIRADHVSVTEQSGIYAGEDGYQIKVGNHTDLKGGIITSTQSAEDKGKNRFQTATLTHSDIKNHSQYKGESFGLGASASISGKTLGQGAQNKPQNKHLTSVADKNSASSSVGYGSDSDSQSSITKSGINTRNIQITDEAAQIRLTGKTAAQTKADIDTNVTTDTAERHSGSLKNTFNKEAVQSELDLQRTVSQDFSKNVQQANTEINQHLDKLKADKEAAETAAAEALANGDMETAKRKAHEAQDAAAKADNWQQGKVILNMLASGLAAPTQSGAGIAAATASPAVSYAIGQHFKDLAGQNANGKLTASQETAHVLAHAVLGAAVAAVGDNNALAGALSAGGSEAAAPYISKWLYGKEKGSDLTAEEKETVTAITNVLGTATGAAVGNSATDAAQGSLNAQSAVENNDTVEQVKFALRHPRIAIAIGSVHKDPGSTLEPNISTIASTFQLNLFPNSEFGGEGGVGNAFRHVLWQATITREFGKDIAVKVGNSHESGEKINYSIRRNLSLDKADEMIDQLNNEIGREIALNTNRLNTKELVGLILETYKNNGFYQAERNSNGNYDVVRKRLSEKDYQNTSNILIHLDNTGAGFKIQQRRKQIRAQISARQWRR

SEQ ID NO: 67 - DNA, 978 bp, Neisseria lactamica
  CDS (1)..(978): Nitrogen assimilation regulatory protein (NtrX)
atcgattttttggaaaaaccgatttccctgcaaaaactgctgtctgcggtcgaaaacgcgttgaagcacggcgcggcgcaggcggaagagagtcccgtgttcgacaagctgggcagcagcgcggcaattcaggaaatgaaccgcgaagtcggggcggcggcaaaacgcacatcccccgtcctcctgacgggcgaggcgggttcgccgtttgaaaccgtggcgcgctatttccataaaaacggcacgccgtgggtcattccggcaaaggcggaatatctggccgatatgccgatggagctgctgaaaaaggcggaaggcggtgtcttatatgcgggcgacatcgcgcgatacggacgcaacatccgggacggcatcgcctttatcgccggcaaggcggaacgctgccgcgtcaggctggtcgcagcgtacggccggccggcgggttcggacggcgggggcgaagaaaaagcggcaggtttcccgccggattcggccgtccgcatcccgcccctgcgtatgcagcacgaagacattcccttcctgatacaggggattgcctgcmatgtggcggaaagccaaaagattgcgcccgccgcattcggtgaagatgcgcttgccgtattgtcccgttacgactggccggggaatttcgagcagttgcaaaacgtcgtcacaacgctgytgctggaggcggacgggcaggaaatcggtatcggcgcggcttcttcggcactkgggcgcggcgcgcctgacgacggarccgggcatatggcgtgcgggttcgacttcaacctgcccctgcgcgaattkagggargcggtggarcggcgttatttcgagtaccacatcgcccaagaaggtcagaatatgagccaagtggcgcagaaagtcggattggaacgcacgcacctttaccgcaaactcaaacagctcggcatcggcgtttcgcgccgtgcgggggagaaaaccgaagaatag

SEQ ID NO: 68 - protein, 325 aa, Neisseria lactamica
  misc_feature (188)..(188): The 'Xaa' at location 188 stands for Asn, or His.
  misc_feature (228)..(228): The 'Xaa' at location 228 stands for Leu.
  misc_feature (245)..(245): The 'Xaa' at location 245 stands for Leu.
  misc_feature (254)..(254): The 'Xaa' at location 254 stands for Ala, or Thr.
  misc_feature (270)..(270): The 'Xaa' at location 270 stands for Leu, or Phe.
IDFLEKPISLQKLLSAVENALKHGAAQAEESPVFDKLGSSAAIQEMNREVGAAAKRTSPVLLTGEAGSPFETVARYFHKNGTPWVIPAKAEYLADMPMELLKKAEGGVLYAGDIARYGRNIRDGIAFIAGKAERCRVRLVAAYGRPAGSDGGGEEKAAGFPPDSAVRIPPLRMQHEDIPFLIQGIACXVAESQKIAPAAFGEDALAVLSRYDWPGNFEQLQNVVTTLXLEADGQEIGIGAASSAXGRGAPDDGXGHMACGFDFNLPLREXREAVERRYFEYHIAQEGQNMSQVAQKVGLERTHLYRKLKQLGIGVSRRAGEKTEE

SEQ ID NO: 69 - DNA, 1275 bp, Neisseria meningitidis (group B)
  CDS (1)..(1275): protein Q9K1K2
atgcgtagcagcgatattttaattgtagacgacgaaatcggcatccgcgacctgctgtcggaaatcctgcaggacgaaggttattcggtcgcattggcggaaaacgccgaagaggcgcgcaagctgcgccatcaggcgcgccccgcgatggtgctgctggatatttggatgcctgattgcgacggcatcacccttttgaaggagtgggcgaaaaacgggcagctcaatatgccggtggtgatgatgagcgggcatgccagcatcgataccgccgtggaagccaccaaaatcggcgcgatcgattttttggaaaaaccgatttccctgcaaaagctgctgtctgccgtcgaaaacgcgttgaagtacggtgcggcgcaaaccgaaacggggcctgtattcgacaagctgggcaacagtgcggcgattcaggaaatgaaccgtgaggtaggggctgcggtgaaatgtgcctctcccgtacttttgacgggcgaggcgggttcgccgtttgaaacggtggcacgctatttccataaaaacggtacgccgtgggtcagcccggcaagggtcgaatatctgatcgatatgccgatggaactgttgcagaaggcggagggcggcgttttgtatgtcggcgacatcgcccagtacagccgcaacatccaagccggtattgcctttattgtcggaaaggcggaacaccgccgcgtcagggtggtcgcatcgggcagcagggcggcaggttcagacggcattgcctgcgaggaaaagctggcggaactgctgtcggaatcggtcgtccgtattccgccgctgcgtatgcagcatgaagacattcccttcctgatacaggggattgcctgcaatgtggcggaaagccaaaagattgcgcctgcctcattcagtgaagaggcacttgccgcattgacccgttacgactggccgggaaatttcgaccaactgcaaagcgtcgttgcaacgctgttgttggaggcggacggacaggaaatcggcgcaggggcggtttcttcccttttggggcagaatgtgcctgccgagggggcggaagatatggtgggcgggtttaatttcaacctgcccctgcgcgaattgagggaggaggtggagcggcgttatttcgagtaccacatcgcccaagaaggtcagaatatgagccaagtggcgcagaaagttggtttggaacgcacgcacctttaccgcaaactcaaacagctcggcatcggcgtttcgcgccgggcgggggaaaaaaccgaagaa

SEQ ID NO: 70 - protein, 425 aa, Neisseria meningitidis (group B)
MRSSDILIVDDEIGIRDLLSEILQDEGYSVALAENAEEARKLRHQARPAMVLLDIWMPDCDGITLLKEWAKNGQLNMPVVMMSGHASIDTAVEATKIGAIDFLEKPISLQKLLSAVENALKYGAAQTETGPVFDKLGNSAAIQEMNREVGAAVKCASPVLLTGEAGSPFETVARYFHKNGTPWVSPARVEYLIDMPMELLQKAEGGVLYVGDIAQYSRNIQAGIAFIVGKAEHRRVRVVASGSRAAGSDGIACEEKLAELLSESVVRIPPLRMQHEDIPFLIQGIACNVAESQKIAPASFSEEALAALTRYDWPGNFDQLQSVVATLLLEADGQEIGAGAVSSLLGQNVPAEGAEDMVGGFNFNLPLRELREEVERRYFEYHIAQEGQNMSQVAQKVGLERTHLYRKLKQLGIGVSRRAGEKTEE

SEQ ID NO: 71 - DNA, 1200 bp, Neisseria lactamica
  misc_feature (421)..(421): unidentified base
  CDS (1)..(1200): DNA processing chain A
atgacagaggacgaacgtttcgcgtggctgcaattggcgtttacaccctatatcggcgcagaaagtttcctgctgctgctgcgccgtttcggcagcgcgtcaaacgccctgtccgcaccggcggaacaggttgccccggcggtgcggcacaaacaggcgcttgaggcttggcgcaatgcggaaaaacgcgccttggcgcggcaggcggcagaagcggcgttggaatgggaaatgcgggacggatgccgtctgatgctgcttcaggatgaagatttccccgaaatgctggcgcaggkgctgaccgcgccgccggttttgtttttgcgcggcaacgtgcggctgctgcacaagccttccgccgccatcgtcggcagccgctatgccacgccgcaggcgatgcggattgccaaagactttcggncacgggcgktgggagagaaaggcattcccgttgtgtcgggtatggcttcgggcatcgacaccgccgcccatcagggcgcgttgcaggcggaaggcggcaccatcgccgtgtgggggacgggcatagaccgcatttatccgccggccaacaaaaaccttgcctatgaaatcgccgaaaaaggattgattgtcagcgagttccccatcggcacgcggccgtatgccggcaattttccgcgccgcaaccgtctgattgccgccctgtcgcaggttacgctggtggttgaagccgcgttggaatccggttcgctgattaccgccggcctggcggcagaaatggggcgcgaagtgatggcggtacccggctcgatagacaatccgcacagcaaaggctgccacaaactgattaaagacggcgcgaaactgacggaatgtttggacgacatcctgaacgaatgcccggggctattgcaaaatacgggtgcttcgtcatattctataaataaggatacgtccgacacgggcagccgcgccgttcagacggcatccgccccgccgccttcgcctgaaggcaaaatgccgtctgaargggcggsatgcggcacagaccgcggcgggatactggataaaatgggtttcgaccccgtcatcccgaacgtgcttgcggggcagtksgctatgcctgcsgcaaatttgtatgccgcactgttggaattggaactggacggcagcgttgccgcaattggcaccggcggcagataccagagtatccgaacttga

SEQ ID NO: 72 - protein, 399 aa, Neisseria lactamica
  misc_feature (99)..(99): The 'Xaa' at location 99 stands for Gly, or Val.
  misc_feature (141)..(141): The 'Xaa' at location 141 stands for Thr, Ala, Pro, or Ser.
  misc_feature (144)..(144): The 'Xaa' at location 144 stands for Val, or Leu.
  misc_feature (337)..(337): The 'Xaa' at location 337 stands for Gly, or Arg.
  misc_feature (339)..(339): The 'Xaa' at location 339 stands for Gly, or Ala.
  misc_feature (365)..(365): The 'Xaa' at location 365 stands for Trp, Cys, Leu, or Phe.
  misc_feature (421)..(421): unidentified base
MTEDERFAWLQLAFTPYIGAESFLLLLRRFGSASNALSAPAEQVAPAVRHKQALEAWRNAEKRALARQAAEAALEWEMRDGCRLMLLQDEDFPEMLAQXLTAPPVLFLRGNVRLLHKPSAAIVGSRYATPQAMRIAKDFRXRAXGEKGIPVVSGMASGIDTAAHQGALQAEGGTIAVWGTGIDRIYPPANKNLAYEIAEKGLIVSEFPIGTRPYAGNFPRRNRLIAALSQVTLVVEAALESGSLITAGLAAEMGREVMAVPGSIDNPHSKGCHKLIKDGAKLTECLDDILNECPGLLQNTGASSYSINKDTSDTGSRAVQTASAPPPSPEGKMPSEXAXCGTDRGGILDKMGFDPVIPNVLAGQXAMPAANLYAALLELELDGSVAAIGTGGRYQSIRT

SEQ ID NO: 73 - DNA, 1191 bp, Neisseria meningitidis (group B)
  CDS (1)..(1191): protein Q9K1K1
atgacagaggacgaacgtttcgcgtggctgcaattggcgtttacgccctatatcggcgcggaaagtttcctgctgctgatgcgccgtttcggcagcgcgcaaaatgccctgtccgcaccggcggaacaggtggcggcactgatacggcacaaacaggcgcttgaggcttggcgcaatgcggaaaaacgcgctctggcgcggcaggcggcagaagcggcattggaatgggaaatgcgggacggatgccgcctgatgctgcttcaggatgaagattttcccgaaatgctgacgcaggggctgaccgcgccaccggttttgtttttgcgcggcaacgtgcaactgctgcacaaaccttccgccgccatcgtcggcagccgtcatgccacgccgcaggcgatgcggattgccaaagatttcggcaagtcgttgggtgggaaaggcattcccgttgtgtcgggtatggcttcgggcatcgataccgccgcccatcagggtgcgttgcaggcagaaggcggcaccatcgccgtgtgggggacgggcatagaccgcatttatccgccggtcaacaaaaaccttgcctatgaaatcgccgaaaaaggattgattgtcagcgagttccccatcggcacgcggccgtatgccggcaattttccgcgccgcaaccgcctgattgccgccctgtcgcaagtaacgctggtggttgaagccgcgttggaatccggttcgctgattactgccagattggcggcggagatggggcgcgaagtgatggcggtacccggctcgatagacaatccacacagtaaaggctgccacaaactgattaaagacggcgcaaaattggtggaatgcctggacgacatcctgaacgaatgcccggggctattgcaaaatacgggtgcttcatcatattctataaataagggaatacctgaaaagcgcatcactgccgttcagacggcatccgaccagctgtctctgcctgaaggcaaaatgccgtctgaaaagacggagaaccgacccgtcggcggcagtatcttggacaggatgggtttcgacccagttcatcccgacgtgcttgccggacagttggctatgcctgccgcagatttgtatgccgcactgttggaattggaattggacggcagcgttgccgcaatgcccggcggcagataccagcgtatccgaact

SEQ ID NO: 74 - protein, 397 aa, Neisseria meningitidis (group B)
MTEDERFAWLQLAFTPYIGAESFLLLMRRFGSAQNALSAPAEQVAALIRHKQALEAWRNAEKRALARQAAEAALEWEMRDGCRLMLLQDEDFPEMLTQGLTAPPVLFLRGNVQLLHKPSAAIVGSRHATPQAMRIAKDFGKSLGGKGIPVVSGMASGIDTAAHQGALQAEGGTIAVWGTGIDRIYPPVNKNLAYEIAEKGLIVSEFPIGTRPYAGNFPRRNRLIAALSQVTLVVEAALESGSLITARLAAEMGREVMAVPGSIDNPHSKGCHKLIKDGAKLVECLDDILNECPGLLQNTGASSYSINKGIPEKRITAVQTASDQLSLPEGKMPSEKTENRPVGGSILDRMGFDPVHPDVLAGQLAMPAADLYAALLELELDGSVAAMPGGRYQRIRT

SEQ ID NO: 75 - DNA, 456 bp, Neisseria lactamica
  CDS (1)..(456)
  misc_feature (65)..(66): unidentified base
  misc_feature (123)..(123): unidentified base
  misc_feature (133)..(134): unidentified base
  misc_feature (139)..(139): unidentified base
  misc_feature (175)..(176): unidentified base
  misc_feature (171)..(171): unidentified base
  misc_feature (214)..(214): unidentified base
  misc_feature (263)..(263): unidentified base
  misc_feature (299)..(299): unidentified base
  misc_feature (322)..(322): unidentified base
  misc_feature (324)..(324): unidentified base
  misc_feature (333)..(333): unidentified base
  misc_feature (377)..(377): unidentified base
  misc_feature (423)..(423): unidentified base
  misc_feature (432)..(432): unidentified base
  misc_feature (437)..(437): unidentified base
atgaccgaagtcatcgccacctcatggcattttcaagatttcgatacctgtccgccgcccaagannttgggtatgttgttggaagaggcgggtttcgatacgatggaaatccgcaacaccctnatgatgatgnnagtantgctcaacagtccgattttccccgaacctgcngcanncggcgcattgcgcgtgtacagcaaagaagaaaccgacnacctgccgcaggaagtgatggggctgatgcagtatctgattgaagaaanagccgtcagctgcgaacagcgggaaatcatcattcncgcgctgatgcatatccccggcnangaaattacngtagataccgccaaagtgctgaccctgctgcttttatgggcaancaagagcgagctgcccgtgttggtcggcgacgagctgatgagcgcncttttactngatancaaaccctcgatgaactga

SEQ ID NO: 76 - protein, 151 aa, Neisseria lactamica
  misc_feature (22)..(22): The 'Xaa' at location 22 stands for Lys, Asn, Arg, Ser, Thr, Ile, or Met.
  misc_feature (41)..(41): The 'Xaa' at location 41 stands for Leu.
  misc_feature (45)..(45): The 'Xaa' at location 45 stands for Lys, Arg, Thr, Ile, Glu, Gly, Ala, Val, Gln, Pro, Leu, a stop codon, or Ser.
  misc_feature (47)..(47): The 'Xaa' at location 47 stands for Met, Val, or Leu.
  misc_feature (59)..(59): The 'Xaa' at location 59 stands for Asn, Ser, Thr, Ile, Asp, Gly, Ala, Val, His, Arg, Pro, Leu, Tyr, Cys, or Phe.
  misc_feature (72)..(72): The 'Xaa' at location 72 stands for Asn, Asp, His, or Tyr.
  misc_feature (88)..(88): The 'Xaa' at location 88 stands for Lys, Arg, Thr, or Ile.
  misc_feature (100)..(100): The 'Xaa' at location 100 stands for His, Arg, Pro, or Leu.
  misc_feature (108)..(108): The 'Xaa' at location 108 stands for Lys, Asn, Glu, Asp, Gln, His , a stop codon, or Tyr.
  misc_feature (111)..(111): The 'Xaa' at location 111 stands for Thr.
  misc_feature (126)..(126): The 'Xaa' at location 126 stands for Asn, Ser, Thr, or Ile.
  misc_feature (144)..(144): The 'Xaa' at location 144 stands for Leu.
  misc_feature (146)..(146): The 'Xaa' at location 146 stands for Asn, Ser, Thr, or Ile.
  misc_feature (65)..(66): unidentified base
  misc_feature (123)..(123): unidentified base
  misc_feature (133)..(134): unidentified base
  misc_feature (139)..(139): unidentified base
  misc_feature (175)..(176): unidentified base
  misc_feature (171)..(171): unidentified base
  misc_feature (214)..(214): unidentified base
  misc_feature (263)..(263): unidentified base
  misc_feature (299)..(299): unidentified base
  misc_feature (322)..(322): unidentified base
  misc_feature (324)..(324): unidentified base
  misc_feature (333)..(333): unidentified base
  misc_feature (377)..(377): unidentified base
  misc_feature (423)..(423): unidentified base
  misc_feature (432)..(432): unidentified base
  misc_feature (437)..(437): unidentified base
MTEVIATSWHFQDFDTCPPPKXLGMLLEEAGFDTMEIRNTXMMMXVXLNSPIFPEPAAXGALRVYSKEETDXLPQEVMGLMQYLIEEXAVSCEQREIIIXALMHIPGXEIXVDTAKVLTLLLLWAXKSELPVLVGDELMSALLXDXKPSMN

SEQ ID NO: 77 - DNA, 459 bp, Neisseria meningitidis (group B)
  CDS (1)..(459): protein Q9JR28
atgaccgaagtcatcgcctacctcatcgaacatttccaagatttcgatacctgcccgccgcccgaagacttgggtatgctgcttgaagaagcgggtttcgatacgatggaaatcggcaacaccctgatgatgatggaagtattgctcaacagctccgaattttccgccgaacccgccgacagcggcgcattgcgcgtgtacagcaaagaagaaaccgacaacctgccgcaggaagtgatggggctgatgcagtatctgattgaagaaaaagccgtcagctgcgaacagcgggaaatcatcatccacgcgctcatgcacattccgggcgacgaaattaccgtagataccgccaaagtgctgaccctgctgcttttatgggcaaacaagagcgagctgcccgtgttggtcggcgacgagctgatgagcgcgcttttactcgacaacaaacccacgatgaac

SEQ ID NO: 78 - protein, 153 aa, Neisseria meningitidis (group B)
MTEVIAYLIEHFQDFDTCPPPEDLGMLLEEAGFDTMEIGNTLMMMEVLLNSSEFSAEPADSGALRVYSKEETDNLPQEVMGLMQYLIEEKAVSCEQREIIIHALMHIPGDEITVDTAKVLTLLLLWANKSELPVLVGDELMSALLLDNKPTMN

SEQ ID NO: 79 - DNA, 1263 bp, Neisseria lactamica
  CDS (1)..(1263): BirA protein/Bvg accessory factor
atcaagtggcccaacgatttggtcgtggggcgcgacaaattaggcggcatcctgattgaaacggtcagggcgggcggcaagacggttgccgtcgtcggcatcggcatcaattttgtcctgcccaaggaagtggaaaacgccgcttccgtgcaatcgctgcttcagacggcatcgcggcggggcagtatcggtgccgccgtgttgctkgaaaccaattgtttggcgggaactggaaccgcggtgttggaacaatatgcgaagaagggtttcgcwccgttttttttaaaggtaattacgaaacggccaamcagtgaccacggtaaggcggtattgctgttgcgcgacggagaaaccgtgtgcgaaggcacggtcaggggtgtggatgaaaaaggcgtattgcatttggacactgcggcgggcaggcaaaccgccgtcagcggcgaaatcagcctgcggcccgatgacaggccggtttccgtgccgaagcggcgggagccggaacgtttgctgctgttggacggcggcaacagccggctcaagtgggcgtgggtggaaaacggcacgttcgcaaccgtcggcagtgcgccgtaccgcgatttgtcgcctttgggcgcggagtgggcggaaaaggcggatgaacgcgtccwcattgtcggttgcgccgtgtgcwgagaacttaaaaaagcgcaggttcaggaacaaatcgcccgccccatcgaatggctkwcttycgcccatcaggctttgggcatacgcaaccactaccgcwgccccgaagaacacggygcggaccgttggttwaacgccttgggcagccgccgcttcagccgcaacgcctgcgtcgtcgtcagttgcggtacggcggtaacggttgatgcgctcaccgatgacgggcattatctcggtggaaccatcatgcccggtttccacctgatgaaagaatcgcttgccgtccgaaccgccaacctcaaccgccccgccggcaagcgttaccctttcccgaccaccacaagcaacgcmatcgccagcggtatgatggatwcggtttwwggytcgataatgatratgcscgggcgtttgaaagaaaaaatcggggcgggkaagccgktwgatgtcgtgatgaccgwcggcggcgcggcaaaagtcwcagaagccctkcckcctgcatttttggcggaaaataccgtgcgtgtgwmgwacaacctygtcatcactgggttgttgaacatgattgctgccgaaggcggggaatcggaacattaa

SEQ ID NO: 80 - protein, 420 aa, Neisseria lactamica
  misc_feature (69)..(69): The 'Xaa' at location 69 stands for Leu.
  misc_feature (103)..(103): The 'Xaa' at location 103 stands for Asn, or Thr.
  misc_feature (216)..(216): The 'Xaa' at location 216 stands for His, or Leu.
  misc_feature (224)..(224): The 'Xaa' at location 224 stands for Arg, or a stop codon.
  misc_feature (242)..(242): The 'Xaa' at location 242 stands for Leu.
  misc_feature (243)..(243): The 'Xaa' at location 243 stands for Thr, or Ser.
  misc_feature (244)..(244): The 'Xaa' at location 244 stands for Ser, or Phe.
  misc_feature (257)..(257): The 'Xaa' at location 257 stands for Ser, or Cys.
  misc_feature (262)..(262): The 'Xaa' at location 262 stands for Gly.
  misc_feature (267)..(267): The 'Xaa' at location 267 stands for Leu, or Phe.
  misc_feature (348)..(348): The 'Xaa' at location 348 stands for Thr, or Ser.
  misc_feature (350)..(350): The 'Xaa' at location 350 stands for a stop codon, Tyr, Leu, or P he.
  misc_feature (351)..(351): The 'Xaa' at location 351 stands for Gly.
  misc_feature (355)..(355): The 'Xaa' at location 355 stands for Met, or Ile.
  misc_feature (357)..(357): The 'Xaa' at location 357 stands for Arg, or Pro.
  misc_feature (367)..(367): The 'Xaa' at location 367 stands for Gly.
  misc_feature (370)..(370): The 'Xaa' at location 370 stands for Val, Leu, or Phe.
  misc_feature (376)..(376): The 'Xaa' at location 376 stands for Asp, or Val.
  misc_feature (383)..(383): The 'Xaa' at location 383 stands for Thr, or Ser.
  misc_feature (386)..(386): The 'Xaa' at location 386 stands for Leu.
  misc_feature (387)..(387): The 'Xaa' at location 387 stands for Pro.
  misc_feature (399)..(399): The 'Xaa' at location 399 stands for Lys, Thr, a stop codon, or S er.
  misc_feature (400)..(400): The 'Xaa' at location 400 stands for Asn, or Tyr.
  misc_feature (402)..(402): The 'Xaa' at location 402 stands for Leu.
IKWPNDLVVGRDKLGGILIETVRAGGKTVAVVGIGINFVLPKEVENAASVQSLLQTASRRGSIGAAVLXETNCLAGTGTAVLEQYAKKGFAPFFLKVITKRPXSDHGKAVLLLRDGETVCEGTVRGVDEKGVLHLDTAAGRQTAVSGEISLRPDDRPVSVPKRREPERLLLLDGGNSRLKWAWVENGTFATVGSAPYRDLSPLGAEWAEKADERVXIVGCAVCXELKKAQVQEQIARPIEWXXXAHQALGIRNHYRXPEEHXADRWXNALGSRRFSRNACVVVSCGTAVTVDALTDDGHYLGGTIMPGFHLMKESLAVRTANLNRPAGKRYPFPTTTSNAIASGMMDXVXXSIMXMXGRLKEKIGAXKPXDVVMTXGGAAKVXEAXXPAFLAENTVRVXXNXVITGLLNMIAAEGGESEH

SEQ ID NO: 81 - DNA, 1776 bp, Neisseria meningitidis (group B)
  CDS (1)..(1776): protein Q9JFX1
atgacggttttgaagctttcgcactggcgggtgttggcggagcttgccgacggtttgccgcaacacgtctcgcaactggcgcgtatggcggatatgaagccgcagcagctcaacggtttttggcagcagatgccggcgcacatacgcgggctgttgcgccaacacgacggctattggcggctggtgcgcccattggcggttttcgatgccgaaggtttgcgcgagctgggggaaaggtcgggttttcagacggcattgaagcacgagtgcgcgtccagcaacgacgagatactggaattggcgcggattgcgccggacaaggcgcacaaaaccatatgcgtgacccacctgcaaagtaagggcagggggcggcaggggcggaagtggtcgcaccgtttgggcgagtgtctgatgttcagttttggctgggtgtttgaccggccgcagtatgagttgggttcgctgtcgcctgttgcggcagtggcgtgtcggcgcgccttgtcgcgtttaggtttggatgtgcagattaagtggcccaatgatttggttgtcggacgcgacaaattgggcggcattctgattgaaacggtcaggacgggcggcaaaacggttgccgtggtcggtatcggcatcaattttgtcctgcccaaggaagtagaaaatgccgcttccgtgcaatcgctgtttcagacggcatcgcggcggggcaatgccgatgccgccgtgctgctggaaacgctgttggtggaactggacgcggtgttgttgcaatatgcgcgggacggatttgcgccttttgtggcggaatatcaggctgccaaccgcgaccacggcaaggcggtattgctgttgcgcgacggcgaaaccgtgttcgaaggcacggttaaaggcgtggacggacaaggcgttttgcacttggaaacggcagagggcaaacagacggtcgtcagcggcgaaatcagcctgcggtccgacgacaggccggtttccgtgccgaagcggcgggattcggaacgttttctgctgttggacggcggcaacagccggctcaagtgggcgtgggtggaaaacggcacgttcgcaaccgtcggtagcgcgccgtaccgcgatttgtcgcctttgggcgcggagtgggcggaaaaggcggatggaaatgtccgcatcgtcggttgcgctgtgtgcggagaattcaaaaaggcacaagtgcaggaacagctcgcccgaaaaatcgagtggctgccgtcttccgcacaggctttgggcatacgcaaccactaccgccaccccgaagaacacggttccgaccgctggttcaacgccttgggcagccgccgcttcagccgcaacgcctgcgtcgtcgtcagttgcggcacggcggtaacggttgacgcgctcaccgatgacggacattatctcgggggaaccatcatgcccggtttccacctgatgaaagaatcgctcgccgtccgaaccgccaacctcaaccggcacgccggtaagcgttatcctttcccgaccacaacgggcaatgccgtcgccagcggcatgatggatgcggtttgcggctcggttatgatgatgcacgggcgtttgaaagaaaaaaccggggcgggcaagcctgtcgatgtcatcattaccggcggcggcgcggcaaaagttgccgaagccctgccgcctgcatttttggcggaaaataccgtgcgcgtggcggacaacctcgtcatttacgggttgttgaacatgattgccgccgaaggcagggaatatgaacatatt

SEQ ID NO: 82 - protein, 592 aa, Neisseria meningitidis (group B)
MTVLKLSHWRVLAELADGLPQHVSQLARMADMKPQQLNGFWQQMPAHIRGLLRQHDGYWRLVRPLAVFDAEGLRELGERSGFQTALKHECASSNDEILELARIAPDKAHKTICVTHLQSKGRGRQGRKWSHRLGECLMFSFGWVFDRPQYELGSLSPVAAVACRRALSRLGLDVQIKWPNDLVVGRDKLGGILIETVRTGGKTVAVVGIGINFVLPKEVENAASVQSLFQTASRRGNADAAVLLETLLVELDAVLLQYARDGFAPFVAEYQAANRDHGKAVLLLRDGETVFEGTVKGVDGQGVLHLETAEGKQTVVSGEISLRSDDRPVSVPKRRDSERFLLLDGGNSRLKWAWVENGTFATVGSAPYRDLSPLGAEWAEKADGNVRIVGCAVCGEFKKAQVQEQLARKIEWLPSSAQALGIRNHYRHPEEHGSDRWFNALGSRRFSRNACVVVSCGTAVTVDALTDDGHYLGGTIMPGFHLMKESLAVRTANLNRHAGKRYPFPTTTGNAVASGMMDAVCGSVMMMHGRLKEKTGAGKPVDVIITGGGAAKVAEALPPAFLAENTVRVADNLVIYGLLNMIAAEGREYEHI

SEQ ID NO: 83 - DNA, 411 bp, Neisseria lactamica
  CDS (1)..(411): putative periplasmic protein
atgaaatggctctttacccttttggcggtactcaatattgccgtattcggcggcacggtgggttataaattagccgttaaagcggcgggcggcgtgccggaaaaccgggccgtccgaaaaacaacgcccctcgcaacgcccgccgccggcaatgcggctgcatccgtggaggatacggcggcactgctcaaacagggcgacatcctgaccgaagaacaggcggagcagttgcgcttgaagaaagaagcggagcagaaaaagctcaaagagaaaaaacagcgcgaggaaaaagcccgccgcgaaaaactcgccgccgaaaaggcgcaggcggaacgcgaaaacggtgcggcggatgccttatgcgccgcgcaggcaagcctcacgatggacgaagacgactaccaccggatc

SEQ ID NO: 84 - protein, 137 aa, Neisseria lactamica
MKWLFTLLAVLNIAVFGGTVGYKLAVKAAGGVPENRAVRKTTPLATPAAGNAAASVEDTAALLKQGDILTEEQAEQLRLKKEAEQKKLKEKKQREEKARREKLAAEKAQAERENGAADALCAAQASLTMDEDDYHRI

SEQ ID NO: 85 - DNA, 864 bp, Neisseria meningitidis (group B)
  CDS (1)..(864): protein Q9JXF2
atgaaatggctatttatccttttggttgcgattaatattgccgtattcggcggtacggtaggttacaaactgacactgaaacaggccggcagaataccggaggcacagaatgccgcaaacaatttgcaggttcaaccagttgccccaactatgccggttgttcggaatattccagcatccggtcctgtcgttcaggcggcatctgaatcggatacaggcgcactgctcaaacagggcgacattctgagcgaagaacaggcggagcagttgcgcttgaaaaaagaagcggaacagaaaaaactgaaagagaaaaaacagcgtgaagaaaaagcccgccgcgaaaaactcgccgccgaaaaggcgcaggcggaacgcgaaaacggcgcggcggatgccttatgcgccgcgcaggcaagcctcacgatggacgaagatgactaccaccgcatcaaaggacttttgggcaaatggtcgcacgttgccagcaggagcgtcgaaaaacgcaccgcccaagccaaacctgccgacaaaacctaccgcgtcgtcctgcccgtttccgccgatgccgaaaatcaggcggcggagctgtctgccaaaggtttcaaccccataccgtttgacggcgcattgagtttgggtgtcggcaacagccgggaaaacgcccaagccctgcaaaaccggcttgccggcgccggattcggcggggcgcatattgtcgaacactttgccgaagccgacaggcaggacgattctttgagcgtgtcgcgtatgacggttttgtttaccggcgtgaatgccgccgatgcggacgaaattcgtaaaatcacgtccctatacggcaaactgaacctcaagtcttgcaaa

SEQ ID NO: 86 - protein, 288 aa, Neisseria meningitidis (group B)
MKWLFILLVAINIAVFGGTVGYKLTLKQAGRIPEAQNAANNLQVQPVAPTMPVVRNIPASGPVVQAASESDTGALLKQGDILSEEQAEQLRLKKEAEQKKLKEKKQREEKARREKLAAEKAQAERENGAADALCAAQASLTMDEDDYHRIKGLLGKWSHVASRSVEKRTAQAKPADKTYRVVLPVSADAENQAAELSAKGFNPIPFDGALSLGVGNSRENAQALQNRLAGAGFGGAHIVEHFAEADRQDDSLSVSRMTVLFTGVNAADADEIRKITSLYGKLNLKSCK

SEQ ID NO: 87 - DNA, 387 bp, Neisseria lactamica
  CDS (1)..(387): Cytochrome C precursor
gatccgacccgtccgagcggctggaacaataccgtattcgataaagtcggtatgccccacccgttgtgggaacagcaaggtgttcaggcggtcgagttggatgccaaaggccagcccgttatggtgaaagacgaacacggcgagatgaagcccaagctgtattgggaatctaccggtctgcacagccgccgcctgccgaacggcaaagtcatccaaaaagagtatgacgcatatgtacgtgattkggtcaatttactcgtgtatatgggcgagcctgcacaactgcaacgcaaacgtatcggctatgtcgtgatgattttcttattggcggttatgctgcctttggcgtatttcctgaaaaaagaatattggaaagacgtacactaa

SEQ ID NO: 88 - protein, 128 aa, Neisseria lactamica
  misc_feature (82)..(82): The 'Xaa' at location 82 stands for Trp, or Leu.
DPTRPSGWNNTVFDKVGMPHPLWEQQGVQAVELDAKGQPVMVKDEHGEMKPKLYWESTGLHSRRLPNGKVIQKEYDAYVRDXVNLLVYMGEPAQLQRKRIGYVVMIFLLAVMLPLAYFLKKEYWKDVH

SEQ ID NO: 89 - DNA, 786 bp, Neisseria meningitidis
  CDS (1)..(786): protein Q9JWG
atgaaacaagctatgaaaaattggtttgctgccttgctgttggcagtacccatgggtgcggcatttgcttcgggcggtcatgcacactatgagaaagtcgatatcgatttgcgcgaccaagtcagcctgcagcgcggcgcacaaatctttaccaactattgcctgtcctgccactcggcaagcggtatgcgtttcaaccgtttgaaagacatcggtttgactgacgaagaaatcaagaaaaacctgatgtttaccaccgataatgtcggcgatgtcatgcattcggcgatgaacccgaaagatgcggcaaaatggtttggtgctgctccgcccgatttgacattgattgcgcgttccaaaggtgcagactacctttacgcttatatgcgcggcttctataaagatccgacccgtccgagcggctggaacaatactgtattcgataaagtcggtatgccccacccgttgtgggaacagcaaggcgttcaagccgttgagttggatgccaaaggtcagccggttatggtaaaagacgaacacggcgagatgaagcctaagctgtattgggaatctaccggtttgcacagccgccgtctgcctaacggcaaagtgatccaaaaagagtacgacgcatatgtacgcgatttggtcaattaccttgtgtacatgggcgaacctgcacaactgcaacgcaaacgtataggctatgtcgtgatgattttcctatttgcggttatgctgcctttggcgtatttcctgaaaaaagaatattggaaagacgtacac

SEQ ID NO: 90 - protein, 262 aa, Neisseria meningitidis
MKQAMKNWFAALLLAVPMGAAFASGGHAHYEKVDIDLRDQVSLQRGAQIFTNYCLSCHSASGMRFNRLKDIGLTDEEIKKNLMFTTDNVGDVMHSAMNPKDAAKWFGAAPPDLTLIARSKGADYLYAYMRGFYKDPTRPSGWNNTVFDKVGMPHPLWEQQGVQAVELDAKGQPVMVKDEHGEMKPKLYWESTGLHSRRLPNGKVIQKEYDAYVRDLVNYLVYMGEPAQLQRKRIGYVVMIFLFAVMLPLAYFLKKEYWKDVH

SEQ ID NO: 91 - DNA, 405 bp, Neisseria lactamica
  CDS (1)..(405)
atgggattgatggcggttttgttgcctttggcaactttgttgccgggtgtgttgataacgtggttgatgatgaaaaatcagcttcagggcaaaatttccggtttgaacgcgcaattggcggaaaaggcggcaagatgtgattttgtcgaacaggcgcacggcaaaaccgtgtcggaattggcggtattggacgagaaataccggcatttgcaggacgaaaattatgctttgggcaaccgtttttccgcagccgaaaagcagattgcccatttgcaggaaaaagaggcggaatcggttcggctgaagcagtcgtatatcgatttgcaggaaaaggcacagggtttggcggttgaaaacgaacgtttggcaacgcagctcggacaggagcggaaggcgtttgccgat

SEQ ID NO: 92 - protein, 135 aa, Neisseria lactamica
MGLMAVLLPLATLLPGVLITWLMMKNQLQGKISGLNAQLAEKAARCDFVEQAHGKTVSELAVLDEKYRHLQDENYALGNRFSAAEKQIAHLQEKEAESVRLKQSYIDLQEKAQGLAVENERLATQLGQERKAFAD

SEQ ID NO: 93 - DNA, 1782 bp, Neisseria meningitidis (group B)
  CDS (1)..(1782): Q9JXH2
atggaactgatgactgttttgctgcctttggcggcgttggtgtcgggcgtgttgtttacatggttgctgatgaagggccggtttcagggcgagtttgccggtttgaacgcgcacctggcggaaaaggcggcaagatgtgattttgtcgaacaggcacacggcaaaaccgtgtcggaattggcggtgttggacgggaaataccggcatttgcaggacgaaaattatgctttgggcaaccgtttttccgcagccgaaaagcagattgcccatttgcaggaaaaagaggcggagtcggcgcggctgaagcagtcgtatatcgagttgcaggaaaaggcacagggtttggcggttgaaaacgaacgtttggcaacgcagctcggacaggaacggaaggcgtttgccgaccaatatgccttggaacgccaaatccgccaaagaatcgaaaccgatttggaagaaagccgccaaactgtccgcgacgtgcaaaacgacctttccgatgtcggcaaccgttttgccgcagccgaaaaacagattgcccatttgcaggaaaaagaggcggaagcggagcggttgaggcagtcgcataccgagttgcaggaaaaggcacagggtttggcggttgaaaacgaacgtttggcaacgcaaatcgaacaggaacgccttgcttctgaagagaagctgtccttgctgggcgaggcgcgcaaaagtttgagcgatcagtttcaaaatcttgccaacacgattttggaagaaaaaagccgccgttttaccgagcagaaccgcgagcagctccatcaggttttgaacccgctaaacgaacgcatccacggtttcggcgagttggtcaagcaaacctatgataaagaatcgcgcgagcggctgacgttggaaaacgaattgaaacggcttcaggggttgaacgcgcagctgcacagcgaggcaaaggccctgaccaacgcgctgaccggtacgcagaataaggttcagggcaattggggcgagatgattctggaaacggttttggaaaattccggccttcagaaagggcgggaatatgtggttcaggcggcatccgtccgaaaagaggaagacggcggcacgcgccgcctccagcccgacgttttggtcaacctgcccgacaacaagcagattgtgattgattccaaggtctcgctgacagcttatgtgcgctacacgcaggcggcggatgcggatacggcggcacgcgaactggcggcacacgttgccagcatccgtgcacacatgaaaggcttgtcgctgaaggattacaccgatttggaaggtgtgaacacattggatttcgtctttatgtttatccctgtcgaaccggcctacctgttggcgttgcagaatgacgcgggcttgttccaagagtgtttcgacaaacggattatgctggtcggccccagtacgctgctggcgactttgaggacggtggcgaatatttggcgcaacgaacagcaaaatcagaacgcactggcgattgcggacgaaggcggcaagctgtacgacaagtttgtcggcttcgtacagacgctcgaaagcgtcggcaaaggcatcgatcaggcgcaaagcagttttcagacggcattcaagcaacttgccgaagggcgcgggaatctggtcggacgcgccgagaaactgcgtctgttgggcgtgaaggcaggcaaacaacttcaacgggatttggtcgagcgttccaatgaaacaacggcgttgtcggaatctttggaatacgcggcagaagatgaagcagtc

SEQ ID NO: 94 - protein, 594 aa, Neisseria meningitidis (group B)
MELMTVLLPLAALVSGVLFTWLLMKGRFQGEFAGLNAHLAEKAARCDFVEQAHGKTVSELAVLDGKYRHLQDENYALGNRFSAAEKQIAHLQEKEAESARLKQSYIELQEKAQGLAVENERLATQLGQERKAFADQYALERQIRQRIETDLEESRQTVRDVQNDLSDVGNRFAAAEKQIAHLQEKEAEAERLRQSHTELQEKAQGLAVENERLATQIEQERLASEEKLSLLGEARKSLSDQFQNLANTILEEKSRRFTEQNREQLHQVLNPLNERIHGFGELVKQTYDKESRERLTLENELKRLQGLNAQLHSEAKALTNALTGTQNKVQGNWGEMILETVLENSGLQKGREYVVQAASVRKEEDGGTRRLQPDVLVNLPDNKQIVIDSKVSLTAYVRYTQAADADTAARELAAHVASIRAHMKGLSLKDYTDLEGVNTLDFVFMFIPVEPAYLLALQNDAGLFQECFDKRIMLVGPSTLLATLRTVANIWRNEQQNQNALAIADEGGKLYDKFVGFVQTLESVGKGIDQAQSSFQTAFKQLAEGRGNLVGRAEKLRLLGVKAGKQLQRDLVERSNETTALSESLEYAAEDEAV

SEQ ID NO: 95 - DNA, 699 bp, Neisseria lactamica
  misc_feature (124)..(124): unidentified base
  CDS (1)..(699)
atgacgtttgacgaatggttgggcttgtcaaacctccttaaaattgaagcaagaatgctgttgcaatatgtttcggaatatacgcgcgtgcagttgttgacgcgggccggggaagaaatgccgnacgaagtccgacagcgggcggacaggctggcgcaacgccgtctgaacggcgagccggttgcctatctgttgggctggcgcgagttttacggacggcgtttcgccgtcaacccgaatgtgctgattccgcgccccgaaaccgaacacttggtcgaagccgtattggcgcgcctgcccgaaaacgggcgtgtgtgggatttggggacgggcagcggcgcggttgccgtaaccgtcgcgctcgaacgcccggatgcgtttgtgtgcgcatccgacatcagcccgtccgcccttgaaacggcgcggaaaaatgcggcagatttgggtgcggcggtcgaatttgcacacggttcgtggtttgataccgatatgccgtctgaagggaaatgggacatcatcgtgtccaacccgccctatatcgaaaacggcgatgaacatttgtcgcaaggcgatttgcggtttgagccgcaaatcgcgctgaccgacttttcagacggcctaagctgcatccgcaccttggcgcaaggcgcgcccgaccgtttggcggaaggcggttttttattgctggaacacgcgttt

SEQ ID NO: 96 - protein, 233 aa, Neisseria lactamica
  misc_feature (42)..(42): The 'Xaa' at location 42 stands for Asn, Asp, His, or Tyr.
  misc_feature (124)..(124): unidentified base
MTFDEWLGLSNLLKIEARMLLQYVSEYTRVQLLTRAGEEMPXEVRQRADRLAQRRLNGEPVAYLLGWREFYGRRFAVNPNVLIPRPETEHLVEAVLARLPENGRVWDLGTGSGAVAVTVALERPDAFVCASDISPSALETARKNAADLGAAVEFAHGSWFDTDMPSEGKWDIIVSNPPYIENGDEHLSQGDLRFEPQIALTDFSDGLSCIRTLAQGAPDRLAEGGFLLLEHAF

SEQ ID NO: 97 - DNA, 819 bp, Neisseria meningitidis
  CDS (1)..(819): HemK protein
atgacgtttgataaatggttgggcttgtcaaaactgcctaaaaatgaagcaagaatgctgctgcaatatgtttcggaatatacgcgcgtgcagttgttgacgcggggcggggaagaaatgccggacgaagtccgacagcgggcggacaggctggcgcaacgccgtctgaacggcgagccggttgcctatattttaggtgcgcgcgaattttatggcagacgctttacagtcaacccgagcgtgctgattccgcgccccgaaaccgaacatttggtcgaagccgtattggcgcgcctgccggaaaacgggcgcgtgtgggatttggggacgggcagcggagcggttgccgtaaccgtcgcgctcgaacgccccgatgcgtttgtacgcgcatccgacatcagcccgcccgcccttgaaacggcgcggaaaaatgcggcagatttgggcgcgcgggtcgaatttgcatacggttcgtggttcgacaccgatatgccgtctgaagggaaatgggacatcatcgtgtccaacccgccctatatcgaaaacggcgataaacatttgtcgcaaggcgatttgcggtttgagccgcaaatcgcgctgaccgacttttcagacggcctaagctgcatccgcaccttggcgcaaggcgcgcccgaccgtttggcggagggcggttttttattgctggaacacggtttcgatcagggcgcggcggtgcgcggcgtgttggcggagaatggtttttcaggagtggaaaccctgccggatttggcgggtttggacagggttacgctggggaagtatatgaagcatttgaaa

SEQ ID NO: 98 - protein, 273 aa, Neisseria meningitidis
MTFDKWLGLSKLPKNEARMLLQYVSEYTRVQLLTRGGEEMPDEVRQRADRLAQRRLNGEPVAYILGAREFYGRRFTVNPSVLIPRPETEHLVEAVLARLPENGRVWDLGTGSGAVAVTVALERPDAFVRASDISPPALETARKNAADLGARVEFAYGSWFDTDMPSEGKWDIIVSNPPYIENGDKHLSQGDLRFEPQIALTDFSDGLSCIRTLAQGAPDRLAEGGFLLLEHGFDQGAAVRGVLAENGFSGVETLPDLAGLDRVTLGKYMKHLK

SEQ ID NO: 99 - DNA, 2025 bp, Neisseria lactamica
  misc_feature (843)..(843): unidentified base
  CDS (1)..(2025): Probable ATP dependent helicase DinG
atgctcaccgatttagaaaaaaacgccatccgcgaccattaccaaaatatcggcaaaaacctgcctggtttccgtccgcgtgcttcgcagcgggaaatgattgcggcggtggcaaacgctttttcgcggacgttggcgcgtgaagaaggcggcgagccgccaaagcgcgagggcgagagcatwgscgtaatcgaagggccgacmgcggtgggcaagtcgcttgsctacctgctggcgggcggcattatggcgcagacgcgcggcaaacggstgattgtgagcagcgcgacggttgccttgcaggagcagttggtagaccgcgrmctgccgtttctggtcgaaaaaagcggtttggaactgagcttcgcgcttgccaaagggcgcggccgatatctctgcccctacaaactctaccaactgacgcaaaacaacgcccagcaaaacctgcttggttttgaagcgccggaagtattgtgggacagcaaacccaagcccgaagaattgaagctgctgcgcgacattgccgatgaattttctgcccgacggttcaatggcgaccgcgacgcctggccggaaaaaatcgacgacgcggtttggctcaaagtgaccaacgaccgccacggctgcctgaaagccgcctgtcccaaccgcgccgaatgcccgttttacctggcacgcgatgtcttggaaaccgtcgatgtcgtcgttgccaaccacgaccttctgcttgccgacatcagtatgggcggcggagtgattctgcccgcgcccgcaaacagtttctattgcatagaykaagcgcaccacctgccmaaaamgmcswcaawcrwwkkgycsccrmmncattcswggaatattgccgtttggacgctggaaaaactgcctcagcttaccggcaaaattgccgcgcttaccgataaagccgaacttgccaaccttgccgacgaagccgccgcatccttgctcgacagcctgcacgaatggcagttccatttggcggaagagccgtctttaagtctggggccgtctgaaaacgacagacgaaccaacagcgaaccgacttggctgtgggaagacggcgaaatccccgaaggcctcgaaaccaccgtttaccagaycacctgccgttgccgcagtcgcagcctgctcaaacacgttatcgggctgaacgatgcgctatctgckscacgccgcgaaaaagaacaggacggcgcgctcctcgaccgcytgaccggcgagttcggcctttttatcgcccgtatcgaacaaatcaacgcggtttgggatttgctctccaccgtccctctcgaaggcgaagagccgytggcaaaatggataacccgccgcgccgacgacaaaaacgactacattttcaacgccagccccatcagcagcgcgtcccacttggcmaacagcytgtggcggcgggcggcaggcgcggtgttgacctccgccaccctgcaatccttgggcaactttaacctgatgctgcgccaaaccgggctgcaatggctgcctgaaaccaccamcctcgccctcaaaagcccctttgactttgaaaaacagggcgaactctwmatcccccccatatacgccagccccaaagaccccgaagcccacaccgccgccgtcatcgagtggctgcccaagcttatttcgccctccgaagccatcggcacgctcgtcctgttttcctcgcgcaaacaaatgcaggatgtcgccctgcgcctgcccggagactacctgccgctcctgctcgtacaaggcgaattgcccaaagccgtcctcctgcaaaaacaccaccgggccatagaagaaggcaaagccagcatcatcttcggactcgacagctttgccgaaggactcgacctgcccggcaccgcctgcgtgcaagtcatcatcgccaagctgccgtttgcgatgcccgacaaccccatcgaaaaaacccaaaaccgctggatagaacagcgcggcggcaaccctttcatcgaaatcaccgtccccgaagccggcatcaaactgatc

SEQ ID NO: 100 - protein, 675 aa, Neisseria lactamica
  misc_feature (61)..(61): The 'Xaa' at location 61 stands for Ile.
  misc_feature (62)..(62): The 'Xaa' at location 62 stands for Gly, or Ala.
  misc_feature (68)..(68): The 'Xaa' at location 68 stands for Thr.
  misc_feature (75)..(75): The 'Xaa' at location 75 stands for Gly, or Ala.
  misc_feature (91)..(91): The 'Xaa' at location 91 stands for Val, or Leu.
  misc_feature (108)..(108): The 'Xaa' at location 108 stands for Gly, Glu, or Asp.
  misc_feature (266)..(266): The 'Xaa' at location 266 stands for Glu, or a stop codon.
  misc_feature (271)..(271): The 'Xaa' at location 271 stands for Pro.
  misc_feature (273)..(273): The 'Xaa' at location 273 stands for Lys, or Thr.
  misc_feature (274)..(274): The 'Xaa' at location 274 stands for Thr, or Pro.
  misc_feature (275)..(275): The 'Xaa' at location 275 stands for Thr, or Ser.
  misc_feature (276)..(276): The 'Xaa' at location 276 stands for Asn, or Ile.
  misc_feature (277)..(277): The 'Xaa' at location 277 stands for Glu, Asp, Val, Lys, Asn, or Ile.
  misc_feature (278)..(278): The 'Xaa' at location 278 stands for Gly, Val, Trp, or Leu.
  misc_feature (279)..(279): The 'Xaa' at location 279 stands for Pro, or Ser.
  misc_feature (280)..(280): The 'Xaa' at location 280 stands for Pro.
  misc_feature (281)..(281): The 'Xaa' at location 281 stands for Lys, Asn, Thr, Gln, His, or Pro.
  misc_feature (283)..(283): The 'Xaa' at location 283 stands for Ser.
  misc_feature (284)..(284): The 'Xaa' at location 284 stands for Arg, or Trp.
  misc_feature (373)..(373): The 'Xaa' at location 373 stands for Thr, or Ile.
  misc_feature (396)..(396): The 'Xaa' at location 396 stands for Ala, or Pro.
  misc_feature (410)..(410): The 'Xaa' at location 410 stands for Leu.
  misc_feature (442)..(442): The 'Xaa' at location 442 stands for Leu.
  misc_feature (473)..(473): The 'Xaa' at location 473 stands for Leu.
  misc_feature (510)..(510): The 'Xaa' at location 510 stands for Asn, or Thr.
  misc_feature (526)..(526): The 'Xaa' at location 526 stands for a stop codon, Tyr, Leu, or P he.
  misc_feature (843)..(843): unidentified base
MLTDLEKNAIRDHYQNIGKNLPGFRPRASQREMIAAVANAFSRTLAREEGGEPPKREGESXXVIEGPXAVGKSLXYLLAGGIMAQTRGKRXIVSSATVALQEQLVDRXLPFLVEKSGLELSFALAKGRGRYLCPYKLYQLTQNNAQQNLLGFEAPEVLWDSKPKPEELKLLRDIADEFSARRFNGDRDAWPEKIDDAVWLKVTNDRHGCLKAACPNRAECPFYLARDVLETVDVVVANHDLLLADISMGGGVILPAPANSFYCIDXAHHLXKXXXXXXXXXHXXNIAVWTLEKLPQLTGKIAALTDKAELANLADEAAASLLDSLHEWQFHLAEEPSLSLGPSENDRRTNSEPTWLWEDGEIPEGLETTVYQXTCRCRSRSLLKHVIGLNDALSAXRREKEQDGALLDRXTGEFGLFIARIEQINAVWDLLSTVPLEGEEPXAKWITRRADDKNDYIFNASPISSASHLANSXWRRAAGAVLTSATLQSLGNFNLMLRQTGLQWLPETTXLALKSPFDFEKQGELXIPPIYASPKDPEAHTAAVIEWLPKLISPSEAIGTLVLFSSRKQMQDVALRLPGDYLPLLLVQGELPKAVLLQKHHRAIEEGKASIIFGLDSFAEGLDLPGTACVQVIIAKLPFAMPDNPIEKTQNRWIEQRGGNPFIEITVPEAGIKLI

SEQ ID NO: 101 - DNA, 2148 bp, Neisseria meningitidis (group B)
  CDS (1)..(2148): Q9K181
atgctcaccgatttagaaaaaaacgccatccgcgaccattaccaaaacatcggcaaaaacctgcccggtttccgtccgcgtgcttcgcagcgggaaatgattgcggcggttgccaacgctttttcgcggacgttggcgcgcgaagaaggcggcgagccgcccaagcgcgaaggcgagagcattgccgtgatcgaagggccgaccggcgtgggcaaatcgttggcctaccttttggccggcggcatcatggcgcaaacacgcggcaagcggctgattgtgagcagcgcgacggttgccttgcaggagcagttggtagaccgcgacctgccgtttctggtcgaaaaaagcggtttggaactgaccttcgcacttgccaaagggcgcggccgctatctctgcccctacaaactctatcgactgacgcaaagcaatgcccagcaaaacctgctcggctttgaagcccccgccgtcttgtgggacagcaaacccaagcccgaagaattgaagctgctgcgcgacatcgccgacgaattttccgcccgacggttcaacggcgaccgcgacacttggccggaaaaaatcgatgacgcgatttggctcaaagtgaccaacgaccgccacggctgcctgaaaaccgcctgtcccaaccgtccggaatgtccgttttacctagcacgcgatgtcttggaaaccgtcgatgtcgtcgttgccaaccacgatcttctgcttgccgacatcagtatgggcggcggcgtgattctgcctgcgcccgaaaacagtttctattgcatcgacgaagcgcaccacctgcccaaaaaagccctcagccgttttgccgccgaacattcatggaatattgccgtttggacgctggaaaaactgccgcagctgaccggcaaaattgccgcgctgaccgataaagccgaacttgccaacctagccgacgaagccgccgcatccttgctcgacagcctgcatgaatggcaattccatttggcggaagagccgtctttaagtctgggggtgtctgaaaacgacagacgaaccaacagcgaaccgacttggctgtgggaagacggcaaaatccccgaaggcctcgaaaccaccgtttccaatacggccattgctgcgcgcagcctgctcaaacacgttatcgggctgaacgatgcgctttctgccgcacgccgcgaaaaagaacaggacggcgcgctcctcgaccgcctgaccagcgagttcggtctttttatcgcccgtatcgaacaaatcagcgcggtttgggatttgctctccactgtccccctcgagggtgaagaaccgttggcgaaatggataacccgccgcgccgacgacaaaaacgactacattttcaacgccagccccatcagcagcgcatcccaccttgccaacagcctgtggcggcgtgcggcaggcgcggtattgacttccgccaccctgcaatccttgggcaacttcaacctgatgctgcgccaaaccgggctgcaatggctgcccgaaaccaccaccctcgccctcaaaagcccctttgactttgaaaaacagggcgaactctacatcccccccatatacgccagccccaaagaccccgaagcccacaccgccgccgtcatcgaatggctgcccaagcttatttcgcccaccgaagccatcggcacgctcgtcttgttttcctcgcgcaaacaaatgcaggatgtcgccctgcgcctgcccggagactacctgccgctcttgctcgtacaaggcgaattacccaaagccgtcctcctgcaaaaacaccaccgggccatagaagaaggcaaagccagcatcatcttcggactcgacagctttgccgaaggactcgacctgcccggcaccgcctgcgtgcaagtcatcatcgccaaacttcccttcgccatgcccgacaaccccatcgaaaaaacccaaaaccgctggatagaacagcgcggcggcaaccccttcatcgaaatcaccgtccccgaagccggcatcaaactcatccaggccgtcggccgcctcatccgcaccgaacaagactacggccgcgtaaccatcctcgacaaccgcatcaaaacacagcggtacggccaacaattattggccggcctgccgccgtttaaaaggataggg

SEQ ID NO: 102 - protein, 716 aa, Neisseria meningitidis (group B)
MLTDLEKNAIRDHYQNIGKNLPGFRPRASQREMIAAVANAFSRTLAREEGGEPPKREGESIAVIEGPTGVGKSLAYLLAGGIMAQTRGKRLIVSSATVALQEQLVDRDLPFLVEKSGLELTFALAKGRGRYLCPYKLYRLTQSNAQQNLLGFEAPAVLWDSKPKPEELKLLRDIADEFSARRFNGDRDTWPEKIDDAIWLKVTNDRHGCLKTACPNRPECPFYLARDVLETVDVVVANHDLLLADISMGGGVILPAPENSFYCIDEAHHLPKKALSRFAAEHSWNIAVWTLEKLPQLTGKIAALTDKAELANLADEAAASLLDSLHEWQFHLAEEPSLSLGVSENDRRTNSEPTWLWEDGKIPEGLETTVSNTAIAARSLLKHVIGLNDALSAARREKEQDGALLDRLTSEFGLFIARIEQISAVWDLLSTVPLEGEEPLAKWITRRADDKNDYIFNASPISSASHLANSLWRRAAGAVLTSATLQSLGNFNLMLRQTGLQWLPETTTLALKSPFDFEKQGELYIPPIYASPKDPEAHTAAVIEWLPKLISPTEAIGTLVLFSSRKQMQDVALRLPGDYLPLLLVQGELPKAVLLQKHHRAIEEGKASIIFGLDSFAEGLDLPGTACVQVIIAKLPFAMPDNPIEKTQNRWIEQRGGNPFIEITVPEAGIKLIQAVGRLIRTEQDYGRVTILDNRIKTQRYGQQLLAGLPPFKRIG

SEQ ID NO: 103 - DNA, 327 bp, Neisseria meningitidis (group B)
  CDS (1)..(327): FK506 binding protein
atgggcggcctgattattgaagacttgcaagaaggcttcggaaaagaagcagttaaaggcaaagagattaccgtgcattacacaggttggctggaaaacggaaccaaattcgactccagcctcgaccgccgccagccgctgaccatcacgctcggtgtcggacaagtcatcaaaggctgggacgaaggcttcggcggcatgaaggaaggcggcaaacgcaagctgaccatcccttcggaaatgggctacggcgcacacggcgcgggcggcgtgattcccccgcacgccactttgatatttgaagtcgagctgctgaaagtgtacgaa

SEQ ID NO: 104 - protein, 109 aa, Neisseria meningitidis (group B)
MGGLIIEDLQEGFGKEAVKGKEITVHYTGWLENGTKFDSSLDRRQPLTITLGVGQVIKGWDEGFGGMKEGGKRKLTIPSEMGYGAHGAGGVIPPHATLIFEVELLKVYE

SEQ ID NO: 105 - DNA, 291 bp, Neisseria meningitidis (group B)
  CDS (1)..(291): glutamyl tRNA amidotransferase subunit C
atggcactgacacttgccgacgtagacaaaatcgcccgactctcccgactgcacctgactgcggaagaaaaagaaaaatcgcttcaagaattaaacgacattttcactatggtcgaacagatgcaaaccattaacacagacggcatcgaaccgatggcgcacccgcacgaggccgccctgcgcctgcgcgaagacgaagtaaccgaaaccgaccgcgccgccgaatatcaggcgggtgctccggaagtacgcaaccgtctgtacatcgtaccgcaagttatcgaagaataa

SEQ ID NO: 106 - protein, 96 aa, Neisseria meningitidis (group B)
MALTLADVDKIARLSRLHLTAEEKEKSLQELNDIFTMVEQMQTINTDGIEPMAHPHEAALRLREDEVTETDRAAEYQAGAPEVRNRLYIVPQVIEE

SEQ ID NO: 107 - DNA, 381 bp, Neisseria meningitidis (group B)
  CDS (1)..(381): aspartate 1-decarboxylase
atgttccgtaccatgcttggcggaaaaatccaccgcgccaccgttaccgaagccgatttgaactatgtcggcagtattaccgtcgatcaagacctgttagacgcggcaggcatctaccccaacgaaaaagtcgccattgtcaacaacaacaacggcgaacgttttgaaacctataccattgcagggaaacgcggcagcggcgtgatttgtctgaacggtgctgcagccaggctggtacagaaaggcgatatcgtcatcatcatgtcttacgtccaactctccgaacccgaaatcgccgcacacgaacccaaagtcgtcttggtagacggaaacaacaaaatccgcgacatcatctcctacgagccgccgcacaccgtgctg

SEQ ID NO: 108 - protein, 127 aa, Neisseria meningitidis (group B)
MFRTMLGGKIHRATVTEADLNYVGSITVDQDLLDAAGIYPNEKVAIVNNNNGERFETYTIAGKRGSGVICLNGAAARLVQKGDIVIIMSYVQLSEPEIAAHEPKVVLVDGNNKIRDIISYEPPHTVL

SEQ ID NO: 109 - DNA, 300 bp, Neisseria meningitidis (group B)
  CDS (1)..(300)
atgaccgcgcaacaccaatccgacacgctcttgcaccgtctgaacaccctgccgccgaaacgttacggcgttttcctattgaacgacgattacaccacgatggaatttgtcgtcgaaatcctgaccgaaatctttatgctcggacaagaacaggcggtagcggtaatgctcttggttcatcacgaaggcaaaggcctgtgcggcacttacacgcgcgatattgcccaaaccaaacaacaacaagtcatgcagcgggcaaaagccgaagggcatccgctgcaatgtattgtcgaggagatt

SEQ ID NO: 110 - protein, 100 aa, Neisseria meningitidis (group B)
MTAQHQSDTLLHRLNTLPPKRYGVFLLNDDYTTMEFVVEILTEIFMLGQEQAVAVMLLVHHEGKGLCGTYTRDIAQTKQQQVMQRAKAEGHPLQCIVEEI

SEQ ID NO: 111 - DNA, 387 bp, Neisseria meningitidis (group B)
  CDS (1)..(387): NMB0575
atgagcaacaacatcccggccgaactgaaatacgttgccagccatgaatggctgcgccttgaagaagacggtacgattaccgtcggcattacccaccacgcgcaagagctgttgggcgacatcgtgttcgtcgagctgcccgaagtcggcgcgaaccttgccgctgaagagcaagccggtgtggttgagtctgtaaaagccgcgtccgacgtgtacgcaccgattgcaggcgaagtcgttgccgtcaacgaagatttgccaagcgctccggaaactgccaacagcgatccttacggtgcaggctggttcttcaaactcaaaccggcaaacgttgccgattacgacagtctgctgactgccgaacaatacgcgggcgaagtggattaa

SEQ ID NO: 112 - protein, 128 aa, Neisseria meningitidis (group B)
MSNNIPAELKYVASHEWLRLEEDGTITVGITHHAQELLGDIVFVELPEVGANLAAEEQAGVVESVKAASDVYAPIAGEVVAVNEDLPSAPETANSDPYGAGWFFKLKPANVADYDSLLTAEQYAGEVD

SEQ ID NO: 113 - DNA, 363 bp, Neisseria meningitidis (group B)
  CDS (1)..(363): 50s ribosomal protein L19
atgaacctgattcaacagctcgagcaagaagaaattgcccgcctgaataaagaaatccccgaattcgcaccgggcgacaccgtagtcgtatccgtacgcgtcgtggaaggtacccgcagccgtctgcaagcctacgaaggcgtggttattgcccgtcgcaaccgtggtctgaacagcaacttcatcgtccgcaaaatctccagcggcgaaggtgttgaacgtactttccaactgtactctccgaccgtcgaaaaaatcgaagtcaaacgccgtggcgacgtacgccgtgccaaactgtactacctgcgcggcctgaccggtaaagctgcacgcatcaaagaaaaactgcctgcacgcaaaggt

SEQ ID NO: 114 - protein, 121 aa, Neisseria meningitidis (group B)
MNLIQQLEQEEIARLNKEIPEFAPGDTVVVSVRVVEGTRSRLQAYEGVVIARRNRGLNSNFIVRKISSGEGVERTFQLYSPTVEKIEVKRRGDVRRAKLYYLRGLTGKAARIKEKLPARKG

SEQ ID NO: 115 - DNA, 360 bp, Neisseria meningitidis (group B)
  CDS (1)..(360): 50s ribosomal protein L20
atgccacgcgtaaaacgcggtgttaccgctcgtgcccgtcaccaaaaaatcttcgcgttagccaaaggctaccgcggccgtcgtaaaaacgtttaccgcgttgccaagcaggcggtaatgaaagccggtcaatacgcgtaccgtgaccgccgccaacgcaaacgccaattccgtcaattgtggattgtccgtatcaatgcaggtacgcgtgaaaacgggttgtcttacagcaaatttatgaacggtctgaaacgcgcctctattgaaatcgaccgcaaagtattggctgatttggccgtgttcgataaagccgcttttgcacaattggttgaaaaagccaaagctgctttggctgcttaa

SEQ ID NO: 116 - protein, 119 aa, Neisseria meningitidis (group B)
MPRVKRGVTARARHQKIFALAKGYRGRRKNVYRVAKQAVMKAGQYAYRDRRQRKRQFRQLWIVRINAGTRENGLSYSKFMNGLKRASIEIDRKVLADLAVFDKAAFAQLVEKAKAALAA

SEQ ID NO: 117 - DNA, 363 bp, Neisseria meningitidis (group B)
  CDS (1)..(363): ribonuclease P component
atggactaccgcttcggaaggcagtaccgcttgttgaaaacggatgatttttcatccgtttttgcattcagaaaccgccgcagccgcgacctgctgcaagtttcgcgctcaaacggcaacgggctgggccatccccgcatcggtctggtggtcggcaaaaaaaccgccaaacgcgccaacgaacgaaattatatgaagcgcgttatccgcgactggtttagattgaacaaaaaccggctgccgccgcaggatttcgtcgtgcgcgtccaccgtaaattcgacagggctaccgcaaaacaggcaagggcggaactggcacaactcatgttcggcaaccccgcaaccggatgcaggaaacaggca

SEQ ID NO: 118 - protein, 121 aa, Neisseria meningitidis (group B)
MDYRFGRQYRLLKTDDFSSVFAFRNRRSRDLLQVSRSNGNGLGHPRIGLVVGKKTAKRANERNYMKRVIRDWFRLNKNRLPPQDFVVRVHRKFDRATAKQARAELAQLMFGNPATGCRKQA

SEQ ID NO: 119 - DNA, 366 bp, Neisseria meningitidis (group B)
  CDS (1)..(366)
atgcgtcattacgagatcgtgtttatcgttcatcccgatcaaagcgagcaagtacccgctatggttgaacgttacaaaaccatgattgccgaagcaaacggtaagattcaccgtctggaagactggggtcgccgccagctggcttacccgattaacaaaatccataaagcccattacgttttgatgaacatcgaaaccactcccgaagtggttgaagagctggaaaccgcattccgcttcaatgatgcaatattgcgtcatctgaccatcaaaaccaaacacgccgttaccgaagcatcccctatgttgggtggtgaaaaggctaagaacctgttgagcggtgcgtctgaagaagcggtcgcccaa

SEQ ID NO: 120 - protein, 122 aa, Neisseria meningitidis (group B)
MRHYEIVFIVHPDQSEQVPAMVERYKTMIAEANGKIHRLEDWGRRQLAYPINKIHKAHYVLMNIETTPEVVEELETAFRFNDAILRHLTIKTKHAVTEASPMLGGEKAKNLLSGASEEAVAQ

SEQ ID NO: 121 - DNA, 462 bp, Neisseria meningitidis (group B)
  CDS (1)..(462): bacterioferritin A
atgcaaggcaatcaagctgttgttgattatatgaacgaattgctgtctggcgagctggcggcacgcgaccaatactttatccactcccgcctctactccgaatggggctacaccaaactttttgaacgtctcaaccacgagatggaagaagaaaccacacacgccgaagacttcatccgccgcatcctgatgctgggcggtacgccgaaaatggcacgcgccgaactgaatatcggcacggacgtggtttcctgcctcaaagccgacctgcaaaccgaatatgaagtacgtgatgcgttgaaaaaaggcatcaaactgtgcgaagaggctcaagactatgttacgcgcgacctgatggttgcccaactgaaagataccgaagaagaccacgcccactggctggaacagcagcttcgcctgatcgagttaattggcgaaggcaactactaccaaagccaactg

SEQ ID NO: 122 - protein, 154 aa, Neisseria meningitidis (group B)
MQGNQAVVDYMNELLSGELAARDQYFIHSRLYSEWGYTKLFERLNHEMEEETTHAEDFIRRILMLGGTPKMARAELNIGTDVVSCLKADLQTEYEVRDALKKGIKLCEEAQDYVTRDLMVAQLKDTEEDHAHWLEQQLRLIELIGEGNYYQSQL

SEQ ID NO: 123 - DNA, 486 bp, Neisseria meningitidis (group B)
  CDS (1)..(486): disulphide bond formation protein B
atgaccccgttatttagaaaagccgtttggctgctgtttgccgtttcggtctgtgcatttgccggttctttggcggcacagtatgttttgggtatggagccttgcgttttgtgtatcagtcagcggttatgcgttttggcaaccgcattgtgtacggcaattgtcctgatgtgcagaccaagaagaagggcaggcggtttgttcggtgctgtctttatcagcattccggccgttacgggtatttctgttgcggcatatcagttgtggttgcagtcgctgccgccgggaaccgctccttcgtgcggcgcgccgtggacgttccgcttgaaaggctggcctttgtttgattggttcgagcctgtcgtgcgcgggttcggaaattgtgctgaaccggattatctgctgggaattgctttgcctgtttggagcgtggcgtattttctggcggttgtcctgacggtttggtgggcgtgggcaagggctaaa

SEQ ID NO: 124 - protein, 162 aa, Neisseria meningitidis (group B)
MTPLFRKAVWLLFAVSVCAFAGSLAAQYVLGMEPCVLCISQRLCVLATALCTAIVLMCRPRRRAGGLFGAVFISIPAVTGISVAAYQLWLQSLPPGTAPSCGAPWTFRLKGWPLFDWFEPVVRGFGNCAEPDYLLGIALPVWSVAYFLAVVLTVWWAWARAK

SEQ ID NO: 125 - DNA, 229 bp, Neisseria meningitidis (group B)
  CDS (1)..(228): dihydrofolate reductase
atgctcaaaataaccctaattgcggcgtgtgcggaaaacctgtgcatcggggcgggcaatgctatgccttggcacatccccgaagatttcgcatttttcaaagcctataccttgggcaaacccgtcattatggggcggaaaacgtgggaatccctgcccgtcaaacccctgcccggacggaggaacatcgtcatcagccggcaggcggattattgcgcggcaggcgcgg

SEQ ID NO: 126 - protein, 76 aa, Neisseria meningitidis (group B)
MLKITLIAACAENLCIGAGNAMPWHIPEDFAFFKAYTLGKPVIMGRKTWESLPVKPLPGRRNIVISRQADYCAAGA

SEQ ID NO: 127 - DNA, 447 bp, Neisseria meningitidis (group B)
  CDS (1)..(447): NMB0179
atggacgtacaactccccatcgaagccaaagacatccaaaaactcatcccccaccgctatccgtttctccagctcgaccgcatcaccgccttcgagccgatgaaaaccctgaccgcgattaaaaacgtcaccataaacgaaccccagttccaaggccatttccccgacctgcccgtgatgcccggcgtactcatcatcgaagcgatggcgcaggcgtgcggcacgttggcgattttgagcgaaggcgggcgcaaagaaaacgaattcttcttcttcgccggcatagacgaagcccgtttcaaacgccaagtcatccccggcgaccaactcgtctttgaagtcgagctgctgaccagccggcgcggcatcggcaaattcaacgccgttgccaaagtggacgggcaagttgccgtcgaagccatcatcatgtgtgccaaacgcgtggtt

SEQ ID NO: 128 - protein, 149 aa, Neisseria meningitidis (group B)
MDVQLPIEAKDIQKLIPHRYPFLQLDRITAFEPMKTLTAIKNVTINEPQFQGHFPDLPVMPGVLIIEAMAQACGTLAILSEGGRKENEFFFFAGIDEARFKRQVIPGDQLVFEVELLTSRRGIGKFNAVAKVDGQVAVEAIIMCAKRVV

SEQ ID NO: 129 - DNA, 510 bp, Neisseria meningitidis (group B)
  CDS (1)..(510): fimbral protein
atgaacacccttcaaaaaggttttacccttatcgagctgatgattgtgattgccatcgtcggcattttggcggcagtcgcccttcctgcttatcaagactacacagcccgcgcacaagtttccgaagccattcttttggccgaaggtcaaaaatcagccgttaccgagtattacctgaatcacggcgaatggcccggcaacaacacttctgccggcgtggcaacctcctctgaaatcaaaggcaaatatgttaaaagcgttgaagtcaaaaacggcgtcgttaccgcccaaatggcttcaagcaacgtaaacaacgaaatcaaaggcaaaaaactctccctgtgggccaagcgtcaaaacggttcggtaaaatggttctgcggacagccggttacgcgcgacaaagccaaagccgccaacgacgacgttaccgccgccgccgccgccaacggtaagaagattgacaccaagcacctgccgtcaacctgccgcgacgcaagtgatgccagc

SEQ ID NO: 130 - protein, 170 aa, Neisseria meningitidis (group B)
MNTLQKGFTLIELMIVIAIVGILAAVALPAYQDYTARAQVSEAILLAEGQKSAVTEYYLNHGEWPGNNTSAGVATSSEIKGKYVKSVEVKNGVVTAQMASSNVNNEIKGKKLSLWAKRQNGSVKWFCGQPVTRDKAKAANDDVTAAAAANGKKIDTKHLPSTCRDASDAS

SEQ ID NO: 131 - DNA, 480 bp, Neisseria meningitidis (group B)
  CDS (1)..(480): NMB1512
atgacgaacatccgtatcggacagggctacgatgtccaccaactgaccgaaggcagaaagctgatacttggcggagttgaaatcccatttgaaaaagggctgctcggacactccgatgccgatgcgctgctgcacgccgttaccgacgcgctgctcggtgcggcaggtttgggcgatatcggcagccatttccccgacaccgccgcagagttcaaagatgcggacagccgcgtccttttgcgtgcggcgtatcaaagcgttcaggcgcagggttggcaggcggtcaatgtcgatacgaccgtgattgcacagaaacccaaactcgcgccgcacattccgcaaatgcgtgccaacatcgccgccgatttgggcatagacatttcgtgcgtcaacatcaaaggcaaaaccaacgaaaaactcggctatctcgggcggatggaaggcatagaggcgcaggcggcggtattgctggtacgcatt

SEQ ID NO: 132 - protein, 160 aa, Neisseria meningitidis (group B)
MTNIRIGQGYDVHQLTEGRKLILGGVEIPFEKGLLGHSDADALLHAVTDALLGAAGLGDIGSHFPDTAAEFKDADSRVLLRAAYQSVQAQGWQAVNVDTTVIAQKPKLAPHIPQMRANIAADLGIDISCVNIKGKTNEKLGYLGRMEGIEAQAAVLLVRI

SEQ ID NO: 133 - DNA, 465 bp, Neisseria meningitidis (group B)
  CDS (1)..(465): NMB1816
atgaaatgcccgttttgcgcccaccccgacacccgcgttgccgattcgcgtctgatggaagaacgcaacgccgtgcgccgccgccgccactgccccaactgcggcaaacgcttcggcacgctcgaaaccgccgaactcaaaatgcccgccgtcatcggtccggacaaaaaacgctcgccctttaatgcacaacgcctccgcaacgacctgaccgccgccgcccgaaaatccgccctgacacccgaacagatcgacgaaaccgtccgcctgacggaacacaggctctacacttcgggtcagcgcgacatcccctctgccgcacttgccgacatggtgctaaaagaactgctccgacaagatacggaagccgccgtccgtttcgccgccctgcacaaacgcttcgacaatccggcagactttgcctcgtggctggcgcaagccgtcaaaacaggcggcaaagcctga

SEQ ID NO: 134 - protein, 154 aa, Neisseria meningitidis (group B)
MKCPFCAHPDTRVADSRLMEERNAVRRRRHCPNCGKRFGTLETAELKMPAVIGPDKKRSPFNAQRLRNDLTAAARKSALTPEQIDETVRLTEHRLYTSGQRDIPSAALADMVLKELLRQDTEAAVRFAALHKRFDNPADFASWLAQAVKTGGKA

SEQ ID NO: 135 - DNA, 765 bp, Neisseria meningitidis (group B)
  CDS (1)..(765): 3-dehydroquinate dehydratase
atgtgttcctgccttgttgtcaaaaataccgttatcggaagcggacgcaccaaaatcgccgtgccgcttgtcgcccgcgatgccgccgaactttccgccgtacttgagcaaatcaaaaatatgcccttcgatattgcggagttccgcgccgactttttggaatgcgcgggcagtatcggcgaaatattgcaccacacgcagaccgtccgcgacgcgctgcccgacaagccgctgctgtttacgttcagacggcatggcgaaggcggctcgttcccgtgttcggacgattattattttgaactgctcgacgcgctgatcgaaagccgcctgcccgacatcatcgacatcgagctgttttccggcgaaaccgccgtccggtgcgccgtggcaaatgctcaaaaaaacggcatcgccgccctgctctgcaatcatgagtttcaccgcacgccgccgcaagaagaaatcgtatgccgtctgaaacagatggaggactgcggcgcggacatctgcaaaattgcggtgatgccgcaaagcgcggaagatgtgctgactttgctttccgccacgctcaaagcgaaagagcttgccgccaaaccgattgttacgatgtcgatggggcagacgggggcggtcagccggcttgccggacaggtgttcggctcaagcatcacgttcggttcgggaacgcaaaactccgcgccggggcaaatcggcgtatccgccctccgtgcgacactcgactgcctcgaaaacggcgcagactga

SEQ ID NO: 136 - protein, 254 aa, Neisseria meningitidis (group B)
MCSCLVVKNTVIGSGRTKIAVPLVARDAAELSAVLEQIKNMPFDIAEFRADFLECAGSIGEILHHTQTVRDALPDKPLLFTFRRHGEGGSFPCSDDYYFELLDALIESRLPDIIDIELFSGETAVRCAVANAQKNGIAALLCNHEFHRTPPQEEIVCRLKQMEDCGADICKIAVMPQSAEDVLTLLSATLKAKELAAKPIVTMSMGQTGAVSRLAGQVFGSSITFGSGTQNSAPGQIGVSALRATLDCLENGAD

SEQ ID NO: 137 - DNA, 774 bp, Neisseria meningitidis (group B)
  CDS (1)..(774): NMB0178
atgaccctcatccacccgaccgccgtcatcgaccccaaagccgaactcgactccggcgtcaaagtcggcgcgtacaccgttatcggccccaacgtccaaatcggcgcgaataccgaaatcggtccgcacgccgtcatcaacggccacaccagcatcggcgaaaacaaccgcattttccaatttgccagcctcggcgaaatcccgcaggacaaaaaataccgcgacgagccgaccaagctgattatcggcaacggcaacaccatccgcgaattcaccacctttaatttaggtacggtaaccggcatcggcgaaacccgtatcggcgacgacaactggattatggcgtactgccacctcgcgcacgactgcgtcatcggcaaccacaccattttcgccaacaacgcctcgcttgccggacacgttaccatcggcgactacgtcgttttgggcggctacacgctggttttccaattctgccgcatcggcgactacgccatgaccgcgtttgccgcaggcgtacacaaagacgtgccgccctactttatggcatcgggctaccgcgccgaaccggcggggctcaacagcgaaggcatgcgccgcaacggttttaccgcagagcagatttccgccgtcaaagacgtgtacaaaaccctctaccatcgcggcattccgtttgaagaagccaaggcagacattctccgccgcgccgaaacccaagccgagcttgccgtattccgagactttttcgcacaatcggcgcgcggcatcatccgc

SEQ ID NO: 138 - protein, 258 aa, Neisseria meningitidis (group B)
MTLIHPTAVIDPKAELDSGVKVGAYTVIGPNVQIGANTEIGPHAVINGHTSIGENNRIFQFASLGEIPQDKKYRDEPTKLIIGNGNTIREFTTFNLGTVTGIGETRIGDDNWIMAYCHLAHDCVIGNHTIFANNASLAGHVTIGDYVVLGGYTLVFQFCRIGDYAMTAFAAGVHKDVPPYFMASGYRAEPAGLNSEGMRRNGFTAEQISAVKDVYKTLYHRGIPFEEAKADILRRAETQAELAVFRDFFAQSARGIIR

SEQ ID NO: 139 - DNA, 714 bp, Neisseria meningitidis (group B)
  CDS (1)..(714): NMB0170
atgatggtttatataatgaatgctttcgatataaagtcgacaaagatggacgtattgtctatatctttgcatacgtcagacttgtttgatttggaagatgtgctggtcaaattgggcaagaagtttcaagagtctggtgttgttccatttgtgctggatgttcaagagtttgattatcccgagtctttggatcttgctgcattggtttcgttgttttcaaggcatggtatgcaaattttgggtctgaagcattctaatgaacgttgggctgctgcggctatgaagtatcatttgctgttttgtctgtctcattcggaaaatgttaaagaactgggtcaggttgaggtgcagaaaacggaggatggtcagaaagcaaggaaaacagtattgattacatcccctgtccgtaccggtcagcaggtttatgccgaagatggcgatttgattgttacgggggcggtcagccagggggcggaattgattgcggatggcaatatacatatttatgcgccgatgagggggcgtgctttggccggtgccaagggtgatacttctgcccgcatatttatccactccatgcaggcagaactggtttctgtggcgggtatttaccgtaattttgaacaggatttgccgaaccatctgcacaagcagccggtacagatattgttgcaggataaccgattggttatcagtgcaattggctcagagtaa

SEQ ID NO: 140 - protein, 237 aa, Neisseria meningitidis (group B)
MMVYIMNAFDIKSTKMDVLSISLHTSDLFDLEDVLVKLGKKFQESGVVPFVLDVQEFDYPESLDLAALVSLFSRHGMQILGLKHSNERWAAAAMKYHLLFCLSHSENVKELGQVEVQKTEDGQKARKTVLITSPVRTGQQVYAEDGDLIVTGAVSQGAELIADGNIHIYAPMRGRALAGAKGDTSARIFIHSMQAELVSVAGIYRNFEQDLPNHLHKQPVQILLQDNRLVISAIGSE

SEQ ID NO: 141 - DNA, 757 bp, Neisseria meningitidis (group B)
  CDS (1)..(756): NMB1328
atgacagacaccgccgagaaccaaacacaaaacaactggcaagccggacacccccgcagcatccgcagcttcgtcctccgccaaagccatatgaccgccgcgcagcaacgcgccatcgataccttatgggacagcttcggcatcgactaccaagcaacaccggccgatcttgatgcccgtttcggaagcagccgacccaaaatcctcgaaataggcttcggtatggggacggcaaccgcagaaatcgcccgccgcctgcccgaaaccgacttcctcgccatcgacgtacacggtcccggcgtaggcaacctgctcaaactcatagacgaaaaccatttagaaaacatccgcgtgatgcggcacgatgccgtagaagttgtcgaaaatatgctgcaagacggctcgctcgacggcatccacatattcttccccgacccgtggcacaaaaaacgccaccacaaacgccgtctgatacaagcccccttcatcgccaaactactgcccaaactcaaaaccggcggctatatccacctggcgacagactgggaagaatatgcacagcagatgcttgaagtcctcagtagcttcgacagcctgcaaaatacggcggcagactacgcccccaccccggactaccgccccgaaaccaaattcgaagcgcgcggcaaacgcctcggacacggcgtttgggacttggtattcaaacggatcggataacaaaccactgtttgaaaatgccgtctgaaacatgtttgct

SEQ ID NO: 142 - protein, 238 aa, Neisseria meningitidis (group B)
MTDTAENQTQNNWQAGHPRSIRSFVLRQSHMTAAQQRAIDTLWDSFGIDYQATPADLDARFGSSRPKILEIGFGMGTATAEIARRLPETDFLAIDVHGPGVGNLLKLIDENHLENIRVMRHDAVEVVENMLQDGSLDGIHIFFPDPWHKKRHHKRRLIQAPFIAKLLPKLKTGGYIHLATDWEEYAQQMLEVLSSFDSLQNTAADYAPTPDYRPETKFEARGKRLGHGVWDLVFKRIG

SEQ ID NO: 143 - protein, 4 aa, Neisseria meningitidis (group B)
QTTV

SEQ ID NO: 144 - protein, 8 aa, Neisseria meningitidis (group B)
KCRLKHVC

SEQ ID NO: 145 - DNA, 774 bp, Neisseria meningitidis (group B)
  CDS (1)..(774): NMB0567
atggctaagaaattcgataaagacagcttcagcggcacgctgattgtcgtgttggcggtcagcctgatttgctcggtcatcgttgccggtgcggtcgtcggcttgaaacccatccaagagaaacaaaaactccaagacaaacaaggctatatcttgagcgtagccggtttgatggataaggacaccgacatcggtaaaacctttgccgagcgtatcgagcaacgtgttgtcgatttggcgaccggcgaatacgtcgccgatgcgcctaaagacttcagcgcgcgcatcgcaggcaaagaccctgcccaaagcatccgcatcaaaaccgaagacgatttggcaggcatcaaaagccgtgccaaatacaccgaggtttatttggtaaaaggcgaagacggcaaaatcgggcaaatcatcctgcctatgcacggtaacggtttgtggtcggtcatgtacggctttgtcgccatccagcccgacggcaacaccatcaacggcattacctactacgaacaaggcgaaaccccgggcttgggcggcgaaatcggcaatccgttgtggcagcaaaaattcgtcggcaaaaaactgtttgacggacaaggcaaactcgccctgcacgtcggcaaaggcgcgggttcggacaaagaacacggcgtagatgccctctccggcgcatcgctgacatccaaaggcgtgcaaggttcgttcgcctactggttcggcgaaaacggctatatcccctacctgaacaaattgaaatcagcaggagcgcaa

SEQ ID NO: 146 - protein, 258 aa, Neisseria meningitidis (group B)
MAKKFDKDSFSGTLIVVLAVSLICSVIVAGAVVGLKPIQEKQKLQDKQGYILSVAGLMDKDTDIGKTFAERIEQRVVDLATGEYVADAPKDFSARIAGKDPAQSIRIKTEDDLAGIKSRAKYTEVYLVKGEDGKIGQIILPMHGNGLWSVMYGFVAIQPDGNTINGITYYEQGETPGLGGEIGNPLWQQKFVGKKLFDGQGKLALHVGKGAGSDKEHGVDALSGASLTSKGVQGSFAYWFGENGYIPYLNKLKSAGAQ

SEQ ID NO: 147 - DNA, 792 bp, Neisseria meningitidis (group B)
  CDS (1)..(792): NMB0870
atgattactgtgaacacactgcaaaaaatgaaggcggcgggcgaaaaaatcgctatgctgaccgcttacgaatccagttttgccgcgctgatggacgatgccggcgtggaaatgctgctggtcggcgattctttggggatggcggttcaggggcggaaatcgacgctgcccgtcagcctgcgcgatatgtgttatcacaccgaatgtgtagcacgcggtgcaaaaaatgcgatgattgtcagcgatttgccgtttggtgcatatcagcagagtaaggagcaggcgtttgccgccgccgccgaactgatggctgccggcgcgcatatggttaaactcgaaggcggcgtgtggatggcggaaacgactgaatttttgcaaatgcgcggtattccggtttgtgcgcacatcggtctgaccccgcaatccgtgtttgccttcggcggatataaagttcaggggcgcggcggcaaggcgcaggcgttgcttaacgatgccaaggcgcatgacgatgcgggggcggcggtcgtgctgatggagtgcgtactggcggaactggcaaaaaaggtaactgaaactgtttcctgtccgaccatcggcatcggcgcgggtgcggattgcgacgggcaggttttggtgatgcacgatatgctcggcattttcccgggtaagacggcgaaattcgtcaaaaactttatgcaggggcatgatagtgttcaagcggcggttcgggcgtatgttgccgaagtcaaagccaaaaccttccctgctgcggaacatatttttgcagattga

SEQ ID NO: 148 - protein, 263 aa, Neisseria meningitidis (group B)
MITVNTLQKMKAAGEKIAMLTAYESSFAALMDDAGVEMLLVGDSLGMAVQGRKSTLPVSLRDMCYHTECVARGAKNAMIVSDLPFGAYQQSKEQAFAAAAELMAAGAHMVKLEGGVWMAETTEFLQMRGIPVCAHIGLTPQSVFAFGGYKVQGRGGKAQALLNDAKAHDDAGAAVVLMECVLAELAKKVTETVSCPTIGIGAGADCDGQVLVMHDMLGIFPGKTAKFVKNFMQGHDSVQAAVRAYVAEVKAKTFPAAEHIFAD

SEQ ID NO: 149 - DNA, 729 bp, Neisseria meningitidis (group B)
  CDS (1)..(729): NMB0448
atgcttttaggtgtcaacatcgaccacatcgccaccgtccgcaatgcgcgcggtacgacttatcccagccccgtggaggcggcactggttgccgaaacgcacggtgcggatttgattaccatgcacctgcgcgaagaccgccgccacatcaaagacgcggacgtgtttgccgtcaaaaacgccatccgcacgcgcctgaaccttgaaatggcgttgacggaagaaatgttggaaaacgctttgaaagtgatgccggaagacgtgtgcatcgtgcctgaaaaacgtcaggaaatcacgaccgaaggcggtttggacgtattggcgcaacaggaaaaaatcgccgggttcaccaaaatcctgaccgacgcaggcatacgcgtgtctttgtttatcgatgccgacgacaggcaaatccaagccgcccgtgatgtcggcgcgcccgttgtcgagctgcacacaggcgcgtatgccgacgcgcgcagccacgccgaacaaatcaggcagttcgagcgcatccaaaacggcgcgcatttcgccggcgatttgggcttggtcgtcaacgccggacacggactgaccatacacaacgttacccccatcgcccaaatcctcgccatccgcgaactgaacatcgggcattcgctgattgcccaagccctcttcctcggactgcccgaagccgtgcgccaaatgaaggaggcgatgttcagggcaaggctgctgccgtaa

SEQ ID NO: 150 - protein, 242 aa, Neisseria meningitidis (group B)
MLLGVNIDHIATVRNARGTTYPSPVEAALVAETHGADLITMHLREDRRHIKDADVFAVKNAIRTRLNLEMALTEEMLENALKVMPEDVCIVPEKRQEITTEGGLDVLAQQEKIAGFTKILTDAGIRVSLFIDADDRQIQAARDVGAPVVELHTGAYADARSHAEQIRQFERIQNGAHFAGDLGLVVNAGHGLTIHNVTPIAQILAIRELNIGHSLIAQALFLGLPEAVRQMKEAMFRARLLP

SEQ ID NO: 151 - DNA, 765 bp, Neisseria meningitidis (group B)
  CDS (1)..(762): NMB1294
atgtcttcaaataaagcttcattttttacacgtctgcgccgcttgtgccgtttggcggtctggctgttcaaaaccgggaaaaacctgcgcggtattgacggcggttgccccgagtcgcgcaatcgggcggtaatcgagttgggcaggggggttttggcggctttggatatcggattggaggtgggcagacccgcacccgaacatccgaacggtgtcttggttgccgccaaccacgtgtcctggctggatattttcgcgatgagcgcggtttatccgagcagctttatcgccaagcaggaaatcaaaagctggccggtattgggcaagatggggcagaacgcgggaacggtgttcatcaaccgcaattcgcggcgcgacatcgaaccgattaaccgcgccgtctgcgaaaccttgcaacgcggtcaaaacgtcagttttttccccgaagcgcggacttcctccggattggggcttttgccgttcaaagccgcgctgttccaatccgccatcgatgcgggggcaaaggttttggcggtcgcgctgcgttattatgacgaaacgggaaaaaggacggctcgtccctcatatgccgatgtcggtttgccgacctgcctgtggcgcatcgtgtctatgaaaaaattgacgataagagtcgatttcgtttgcgtggcggatgcggcggaaagcgaagaccgttatgctttaaaagataaaatcgaagaaagcatccgtgccgttgtcgccgacgatgcggatatcgctgtc

SEQ ID NO: 152 - protein, 254 aa, Neisseria meningitidis (group B)
MSSNKASFFTRLRRLCRLAVWLFKTGKNLRGIDGGCPESRNRAVIELGRGVLAALDIGLEVGRPAPEHPNGVLVAANHVSWLDIFAMSAVYPSSFIAKQEIKSWPVLGKMGQNAGTVFINRNSRRDIEPINRAVCETLQRGQNVSFFPEARTSSGLGLLPFKAALFQSAIDAGAKVLAVALRYYDETGKRTARPSYADVGLPTCLWRIVSMKKLTIRVDFVCVADAAESEDRYALKDKIEESIRAVVADDADIA

SEQ ID NO: 153 - DNA, 789 bp, Neisseria meningitidis (group B)
  CDS (1)..(789): Thiazole biosynthesis protein
atgctcaccctatacggcgaaactttcccctcgcggctgctgctcggcacggctgcctacccgacccccgaaatcctcaaacaatccatccaaaccgcccagcctgcgatgattaccgtctcgctgcgccgcgcgggaagcggcggcgaggcgcacggtcaggggttttggtcgctgcttcaagaaaccggcgttcccgtcctgccgaacacggcaggctgccaaagcgtgcaggaagcggtaacgacggcgcaaatggcgcgcgaagtgtttgaaaccgattggataaaattggaactcatcggagatgacgacaccttgcagccggatgtgttccagcttgtcgaagcggcggaaatcctgattaaagacggcttcaaagtgctgccttattgcaccgaagacctgattgcctgccgccgcctgctcgacgcgggctgtcaggcgttgatgccgtgggcggccccgatcggcacgggtttgggcgcggttcacgcctacgcgttgaacgtcctgcgcgaacgcctgcccgacacgccgctgattatcgacgcgggcttgggtttgccctcacaggcggcacaagtgatggaatggggctttgacggcgtgcttttgaatactgccgtttcccgcagcggcgatccggtcaatatggcacgcgccttcgcactcgccgtcgaatccggacggctggcatttgaagccggaccggtcgaagcacgcgacaaagcgcaagccagcacgccgacagtcggacaaccgttttggcattcggcggaatattga

SEQ ID NO: 154 - protein, 262 aa, Neisseria meningitidis (group B)
MLTLYGETFPSRLLLGTAAYPTPEILKQSIQTAQPAMITVSLRRAGSGGEAHGQGFWSLLQETGVPVLPNTAGCQSVQEAVTTAQMAREVFETDWIKLELIGDDDTLQPDVFQLVEAAEILIKDGFKVLPYCTEDLIACRRLLDAGCQALMPWAAPIGTGLGAVHAYALNVLRERLPDTPLIIDAGLGLPSQAAQVMEWGFDGVLLNTAVSRSGDPVNMARAFALAVESGRLAFEAGPVEARDKAQASTPTVGQPFWHSAEY

SEQ ID NO: 155 - DNA, 726 bp, Neisseria meningitidis (group B)
  CDS (1)..(726): NMB2030
atgggagggaaaatgtccgacaaaaaatataatgtcgatgagggggaaatcgccaaattcagccggattgccgacaaatggtgggacaagtcgggcgagttcaaaaccttgcacgacatcaatccgctgcggctggattatatcgacggacacgcggatttgtgcggcaaacgggttttggacgtgggctgcggcggcggcatcttggcggaaagtatggcgcggcgcggcgcggcgtttgtaaagggcatcgacatggcggagcagtcgttggaaaccgcccgcctgcacgcggctttgaacaatgtcgccgatatcgaatacgaatgtatccgcgtggaagaccttgccgaggcggaaccgcactcgttcgatgtggtaacgtgcatggaaatgatggaacacgtccccgatcccgccgccatcgtgcgtgcttgtgccaatctggtcaaaccggacggcatggtgtttttttccaccatcaataaaaacccgaaatcgtacctgcatctgattgtggcggcggaatatctgttgaagtttgtccccaaaggcacgcacgactggaaaaaattcatcgcacctgccgagctggcgcgaatgtgccgtcaggcaggcttggatgtggcggatacgaagggtatgacttaccatgtgttgtcgcaaacttatgccctgtgcgattcgaccgatgtgaattatatgtttgcctgccgtccggcgttc

SEQ ID NO: 156 - protein, 242 aa, Neisseria meningitidis (group B)
MGGKMSDKKYNVDEGEIAKFSRIADKWWDKSGEFKTLHDINPLRLDYIDGHADLCGKRVLDVGCGGGILAESMARRGAAFVKGIDMAEQSLETARLHAALNNVADIEYECIRVEDLAEAEPHSFDVVTCMEMMEHVPDPAAIVRACANLVKPDGMVFFSTINKNPKSYLHLIVAAEYLLKFVPKGTHDWKKFIAPAELARMCRQAGLDVADTKGMTYHVLSQTYALCDSTDVNYMFACRPAF

SEQ ID NO: 157 - DNA, 747 bp, Neisseria meningitidis (group B)
  CDS (1)..(747): NMB2054
atggtattgtgcagggattttctgacttggtgtaatgaaacattgcagacagcgttgtttaaagattacgcccctaacggtttgcaggttgaagggagggaatatatcgggaaaatcgttacgtcggtaacggcaagcagggcagcgattgattttgctgtggagcagaaggcagatttgcttttggtacatcacggtatgttctggaaaaacgagttgccgaccgttactggttggaaaaaagaacggattgccgcactgttacggcacgacatcaatatggcaggctaccatctgcccctggatgcacatcccacactgggcaacaatgcccaactcgccgacagattgggttttgcgacagaaaaacggttcggcgaacaaaacctgctcaactcgggcagcctgaaacaagccaagacactcggcgcattggcggcgcatattgaaacagttttgcaacgtaagcctgtcgttatcggcaatcccgaacgcgaaatccgacgggttgcatggtgcagcggcggggcgcaggggttttttcagacggcaatagacgaaggtgtcgatctgtatttgacgggggaaatctctgaagcccaataccaccttgccaatgaaacgggtacggctttcatttcggcagggcatcacgcgacggaacgttacggcgtacgcgcgctggcagaatcggcggcagaggttttcgggttggaagtgtgccattttgacgaaaacaatccggct

SEQ ID NO: 158 - protein, 249 aa, Neisseria meningitidis (group B)
MVLCRDFLTWCNETLQTALFKDYAPNGLQVEGREYIGKIVTSVTASRAAIDFAVEQKADLLLVHHGMFWKNELPTVTGWKKERIAALLRHDINMAGYHLPLDAHPTLGNNAQLADRLGFATEKRFGEQNLLNSGSLKQAKTLGALAAHIETVLQRKPVVIGNPEREIRRVAWCSGGAQGFFQTAIDEGVDLYLTGEISEAQYHLANETGTAFISAGHHATERYGVRALAESAAEVFGLEVCHFDENNPA

SEQ ID NO: 159 - DNA, 807 bp, Neisseria meningitidis (group B)
  CDS (1)..(807): shikimate-5-dehydrogenase
atgaccgccctcccccgctacgccgttttcggcaaccccgtcgcccacagcaaatcgccgcaaattcatcaacaatttgcccttcaggaaggcgttgacattgaatacgaacgcatttgcgccgacatcggcggtttcgcgcaggcggtttcgacattttttgaaacaggcggttgcggggcaaacgttaccgtaccgttcaaacaggaagcgtttcatctggcggacgagcattccgaacgcgcattggcggcaggtgcggtcaatacgctgattccgttgaaaaacggcaagctgcgtggcgacaacaccgacggtatcggtttgaccaacgacatcacgcaggtcaaaaatattgccatcgagggcaaaaccattttgcttttgggcgcaggcggcgcggtgcgcggcgtgattcctgttttgaaagaacaccgtcctgcccgtatcgtcattgccaaccgtacccgcgccaaagccgaggaattggcgcagcttttcggcattgaagccgtcccgatggcggacgtgaacggcggttttgatatcatcatcaacggcacgtcgggcggtctaaacggtcagattcccgatattccgcccgatatttttcaaaactgcgcgcttgcctacgatatggtgtacggctgcgcggcaaaaccgtttttagattttgcacgacaatcgggtgcgaaaaaaactgccgacggactgggtatgctagtcggtcaagcggcggcttcctacgccctctggcgcggatttacgcccgatatccgccccgttatcgaatacatgaaagcccta

SEQ ID NO: 160 - protein, 269 aa, Neisseria meningitidis (group B)
MTALPRYAVFGNPVAHSKSPQIHQQFALQEGVDIEYERICADIGGFAQAVSTFFETGGCGANVTVPFKQEAFHLADEHSERALAAGAVNTLIPLKNGKLRGDNTDGIGLTNDITQVKNIAIEGKTILLLGAGGAVRGVIPVLKEHRPARIVIANRTRAKAEELAQLFGIEAVPMADVNGGFDIIINGTSGGLNGQIPDIPPDIFQNCALAYDMVYGCAAKPFLDFARQSGAKKTADGLGMLVGQAAASYALWRGFTPDIRPVIEYMKAL

SEQ ID NO: 161 - DNA, 801 bp, Neisseria meningitidis (group B)
  CDS (1)..(801): comL
atgaaaaaaattcttttaacggtttcattaggtttggcactgagtgcctgtgccactcaaggtacggtagataaagatgcccagattacccaagactggagtgtggaaaaactctatgccgaagcccaggacgagctgaacagcagcaattatacgcgagctgtcaaattatacgaaatcttggaatcgcgcttccctaccagccgccatgcccagcaatcccaactggatacggcatacgcctactataaagatgatgagaaggataaggcgctggccgccattgaccgcttccgccgccttcaccctcaacacccgaatatggactacgcgctatacctgcgcggtttggtactgttcaacgaagatcaatctttcttgaacaagctggcctcgcaagactggtccgaccgcgacccgaaagccaaccgcgaagcgtatcaggcctttgcggaactcgtccaacgcttcccgaacagcaaatacgccgccgatgcgaccgcacgcatggtcaaactggtcgatgctttgggcggcaatgaaatgtcggtagcgcgttactacatgaaacgcggcgcatatatcgccgccgccaaccgcgcccaaaaaattatcggcagctatcaaaatacacgctatgtcgaagaatcgctcgccatattggaacttgcctacaagaagttggacaagccccggcttgccgccgatacgcgccgcgtgttggaaaccaacttcccgaaaagcccgttcttaaagcagccgtggcgatctgacgatatgccctggtggcgttactggcac

SEQ ID NO: 162 - protein, 267 aa, Neisseria meningitidis (group B)
MKKILLTVSLGLALSACATQGTVDKDAQITQDWSVEKLYAEAQDELNSSNYTRAVKLYEILESRFPTSRHAQQSQLDTAYAYYKDDEKDKALAAIDRFRRLHPQHPNMDYALYLRGLVLFNEDQSFLNKLASQDWSDRDPKANREAYQAFAELVQRFPNSKYAADATARMVKLVDALGGNEMSVARYYMKRGAYIAAANRAQKIIGSYQNTRYVEESLAILELAYKKLDKPRLAADTRRVLETNFPKSPFLKQPWRSDDMPWWRYWH

SEQ ID NO: 163 - DNA, 807 bp, Neisseria meningitidis (group B)
  CDS (1)..(807): NMB0203
atgacaccgctcaaaatcgccatcgccggcgcaaacggccgtatgggacgcgtattggttgaagccgtcaacaaccatcccgacaccgtcctttccggtgcgcttgaacactcaggctcagaagccctcgggctggacgcaggctacgccgtcggactcaaaaccggcatcgccatttcagacgacgttgacgccgttctcgcacaaagcgacgtactcatcgacttcacccgccccgagcccaccctcaaacacctgcaaaaatgcgttgaaaaacaagtcaacatcatcatcggcacaacaggcttcgacgatacgggcaaagccgctatccacactgccgccgaaaaaacaggcatcgttttcgccgccaacttcagcgtcggcgtcaacctcaccttccacatcctcgacaccgtcgcacgcgtattaaacgaaggctacgacatcgaaatcattgaaggccaccaccgccacaaagtcgatgcccccagcggcaccgcgttacgcatgggcgaagtcatcgccggcgcgctcggcagagacctcaaacaatgcgccgtttacggccgcgaaggccacaccggtccgcgcgatccgtcgaccatcggctttgccaccgtccgcgcaggcgacatcgtcggcgaccacaccgccctcttcgccaccgacggcgagcgcgtggaaatcacccacaaggccagcagccgcatgacctttgccgccggtgccgtccgcgccgcagtttgggtcaacggcaaaacgggtttgtacgatatgcaggacgtactcgggctgaacaaccgt

SEQ ID NO: 164 - protein, 269 aa, Neisseria meningitidis (group B)
MTPLKIAIAGANGRMGRVLVEAVNNHPDTVLSGALEHSGSEALGLDAGYAVGLKTGIAISDDVDAVLAQSDVLIDFTRPEPTLKHLQKCVEKQVNIIIGTTGFDDTGKAAIHTAAEKTGIVFAANFSVGVNLTFHILDTVARVLNEGYDIEIIEGHHRHKVDAPSGTALRMGEVIAGALGRDLKQCAVYGREGHTGPRDPSTIGFATVRAGDIVGDHTALFATDGERVEITHKASSRMTFAAGAVRAAVWVNGKTGLYDMQDVLGLNNR

SEQ ID NO: 165 - DNA, 840 bp, Neisseria meningitidis (group B)
  CDS (1)..(840): TonB protein
atggataaagaacgaattttaacccccgcagtcgtgttttccgtcgcactgctgcatttggcaatggtggcattgctctggcaggcgcacaagctgcccgtgatagagtcaggcaatgttattgaatttgtcgatttgggcgattttggcggaggggacggcgcccccgaaggtgcaggcgcgcctgctgcgcccgaaccgcaacccgtgcccgagccgcccaaacctgtcgagccgcccaagccggttttgaagccggtggttacgaaaaaggcggatgcggatattcagcagcctaaggaagagccgaaacctgaagaaaagccgaaacccgaagaaaaaccgaaaccagagcctaagccggaagcgaagcctgtcccgaaaccggcggaaaaaccggtcgagaagccgtctgaaaaacctgccgaacatcccggcaatgcttctgccaaagcagacagcgagcagggcaatggggaagataagggaactggtaccaaaggagacggaacggggcgcggagaaggcagcggtaaaggtagcggcggtgtcaaaggcgaacacggggaaggagccggcagcagcaaaggcaatcctttacgcgccaacggcagcattccgcgcccggcttatcccacgctttctatggagaatgacgagcagggtacggttgttttgagcgttttggtttctccgggcggtcatgttgagtccgttaaaatcgtgaaaagcagtggtttttcccggttggacaatgcggcacgcaaggcggcgcaaaacgggcattttcaagccaatgcctggacggagtttaaagtccccgtcaagtttgaattgaat

SEQ ID NO: 166 - protein, 280 aa, Neisseria meningitidis (group B)
MDKERILTPAVVFSVALLHLAMVALLWQAHKLPVIESGNVIEFVDLGDFGGGDGAPEGAGAPAAPEPQPVPEPPKPVEPPKPVLKPVVTKKADADIQQPKEEPKPEEKPKPEEKPKPEPKPEAKPVPKPAEKPVEKPSEKPAEHPGNASAKADSEQGNGEDKGTGTKGDGTGRGEGSGKGSGGVKGEHGEGAGSSKGNPLRANGSIPRPAYPTLSMENDEQGTVVLSVLVSPGGHVESVKIVKSSGFSRLDNAARKAAQNGHFQANAWTEFKVPVKFELN

SEQ ID NO: 167 - DNA, 786 bp, Neisseria meningitidis (group B)
  CDS (1)..(786): GTP binding protein
atgagcagaatccggcaggcttttgccgctttggatggcggaaaggcattgattgcctatattacggtgggcgaccccgatattcggacaactttggcattgatgcacggcatggttgcaaacggtgcggatattttggagttgggtgtgccgttttccgatccgatggcggatgggccggttattcagcgtgcggcggagcgggcgttggcaaacgggatttcgctgcgcgatgtcttggatgtcgtcagaaaattccgtgaaaccgacacgcaaacgccggttgttttgatgggatatttgaaccctgtacataagatgggttatcgggagtttgctcaggaagccgcaaaggcgggtgtggacggcgtgttgacggtggattcccctgtcgaaaccatcgatccgctctatcgcgagctgaaggataacggggtcgactgtattttcctgattgcgccgacgacgacggaagaccgtattaaaaccattgccgagctggcaggcggatttgtctattatgtttcgctcaagggcgtaacgggcgcggcaagtttggatacggatgaggtttcgcgtaaaatagagtatttgcatcagtatatcgatattcccatcggtgtcggtttcggcatcagcaatgcggaaagtgcacgcaaaatcggccgggttgccgacgcagttattgtcggcagccggattgtgaaagaaatcgaaaacaatacaggcaacgaggctgccgccgtcggtgctttggtaaaagagttgaaggatgccgtgcgctga

SEQ ID NO: 168 - protein, 261 aa, Neisseria meningitidis (group B)
MSRIRQAFAALDGGKALIAYITVGDPDIRTTLALMHGMVANGADILELGVPFSDPMADGPVIQRAAERALANGISLRDVLDVVRKFRETDTQTPVVLMGYLNPVHKMGYREFAQEAAKAGVDGVLTVDSPVETIDPLYRELKDNGVDCIFLIAPTTTEDRIKTIAELAGGFVYYVSLKGVTGAASLDTDEVSRKIEYLHQYIDIPIGVGFGISNAESARKIGRVADAVIVGSRIVKEIENNTGNEAAAVGALVKELKDAVR

SEQ ID NO: 169 - DNA, 987 bp, Neisseria meningitidis (group B)
  CDS (1)..(987): glycerol-3-phosphate dehydrogenase
atgaaaattaccgttatcggcgcaggttcgtggggtacggcgctcgccctgcatttttcccaacacggcaaccgcgtatccctgtggacgcgcaacgcagaccaagtccgtcaaatgcaggaagcgcgtgaaaacaaacgcggactgcccggcttttcctttcccgaaaccttggaagtgtgtgcggatttggcagacgcgctcaaagacagcggacttgtccttatcgtaacctccgttgccggattgagaagcagcgcagagctgctcaaacagtacggcgcgggacacctccccgtcctcgccgcctgcaaaggattcgagcaggataccgggctgctgacctttcaagtcttgaaagaagtattgcccgacaataagaaaatcggcgtactttccggcccgagttttgcacaggaactcgccaaacaactgccctgcgccgtcgtccttgcctccgaaaaccaagagtggattgaagaactcgtaccgcagctcaacacgaccgtcatgaggctttacggcagtaccgatgttatcggcgtggcggttggcggcgcggtaaaaaatgttatggcgattgccaccggattgtccgacggcctagagtacgggcttaacgcccgtgccgcactggttacgcgcggattagctgaaatcacccgccttgcctccgcaatgggcgcacagcccaaaaccatgatggggctggcaggcatcggcgacctcatcctcacctgcaccggcgcactttcgcgcaaccgccgcgtcggcttgggtttggcagaaggcaaggaactgcatcaggtgctggtcgaaatcggacacgtttccgaaggggtcagcacgatagaagaagtcttcaatactgcctgtaagtaccaaatcgacatgccgattacccaaactctgctgcaactcatccgcaaagaaatgaccccgcaacaggttgtcgaaagactgatggaacgcagcgcgcgttttgaa

SEQ ID NO: 170 - protein, 329 aa, Neisseria meningitidis (group B)
MKITVIGAGSWGTALALHFSQHGNRVSLWTRNADQVRQMQEARENKRGLPGFSFPETLEVCADLADALKDSGLVLIVTSVAGLRSSAELLKQYGAGHLPVLAACKGFEQDTGLLTFQVLKEVLPDNKKIGVLSGPSFAQELAKQLPCAVVLASENQEWIEELVPQLNTTVMRLYGSTDVIGVAVGGAVKNVMAIATGLSDGLEYGLNARAALVTRGLAEITRLASAMGAQPKTMMGLAGIGDLILTCTGALSRNRRVGLGLAEGKELHQVLVEIGHVSEGVSTIEEVFNTACKYQIDMPITQTLLQLIRKEMTPQQVVERLMERSARFE

SEQ ID NO: 171 - DNA, 936 bp, Neisseria meningitidis (group B)
  CDS (1)..(936): porphobilinogen deaminase
atgaacccgaaaaaactcgtcatcgccagccgcgaaagcctgcttgctatgtggcaggcaaagcatatccaaggccgtctgaaggctctgtatcccgattgcgaagtcgagattttgggcatgaccacgcgcggcgatcagattttggacaaaactttgtcaaaagtcggcggtaaaggcttgtttgtcaaagagttggaacaggctttatatgacgggcgcgccgatttggcggtgcattcgattaaggacgtgccgatggatttgcctgaaggtttcgcgcttgccgccatcggcgaacgcgccaatccgtttgacgcgtttgtgtccaaccaatacacgcgtttggaagaaatgcccgaaggcgcggttgtcggcacatccagcctgcgccgcgaagcccagttgcgtgcgcgctatccgcatttgcttatcaaacctttgcgcggcaatgtgcaaacccgtttgtccaaactcgataacggcgaatacgacgcaattatcttggctgccgccggtttgcagcgtctgaaattggacggacgcatccgcatgattttgtcggaatccgacagcctgcctgccgccggacaaggcgcattgggtatcgaaattgccgcgcaccgcgaagatttgtatgaagttttgaaacccttgaaccacggtgttaccaatgcctgcgttaccgccgaacgcgccctcgcacgcgctttgggcggaagctgccaagtgcctttggccgcatattgcacggaagaaaacggcttgctgaccttgcgcggcttggtcggacaccccgacggttcggttgtgttgcgggcggacgcgcaagcccctgccgaatatgccgacgcgctcggacgcgctgtcgctaagaaattggcggacgacggtgcgcgggaattgattggagcagtattgaatacggaaaattga

SEQ ID NO: 172 - protein, 311 aa, Neisseria meningitidis (group B)
MNPKKLVIASRESLLAMWQAKHIQGRLKALYPDCEVEILGMTTRGDQILDKTLSKVGGKGLFVKELEQALYDGRADLAVHSIKDVPMDLPEGFALAAIGERANPFDAFVSNQYTRLEEMPEGAVVGTSSLRREAQLRARYPHLLIKPLRGNVQTRLSKLDNGEYDAIILAAAGLQRLKLDGRIRMILSESDSLPAAGQGALGIEIAAHREDLYEVLKPLNHGVTNACVTAERALARALGGSCQVPLAAYCTEENGLLTLRGLVGHPDGSVVLRADAQAPAEYADALGRAVAKKLADDGARELIGAVLNTEN

SEQ ID NO: 173 - DNA, 906 bp, Neisseria meningitidis (group B)
  CDS (1)..(906): 33kDa chaperonin
atgaatcaaaccgccatcaaccgcgccgatgtgcgtacccgctttatcttcgacgatatgcccgtgcgcgggctgcacgtccgtctggaaaacgtgtggcagcacattgtaaaacagaaaaactatcccgccgccatccgccgcgctttgggtgagttgttggcggcgggtgtgttgctgtcgggcaacctcaaaaacgaaggcacgctgattgtgcaggttcaggggcgggggcggctgaaaatgctggttgcggaagcggcttccgaccgtaccgtccgtgcaaccgcgcgttgggacgaaaccgcagaaatagccgatgacgaaagcctcggcgaccttttgggcgagggcggcgtattcgtgctgacgctgcagcccaaagacggcgaaccctggcagggcgtagtgcctttggaaggcggcggtatcgcgcaaatgttggtgaactatatgaaacgttccgaacagcttgatacgcacatcgtcctgtctgcaagcgacgaagcggcgggcggtctgctggtgcagcgtctgcctgaagaggtattggatgaagaggcatgggaacacgtcagtacgctggcgcgcacgctgacggcggaggagctggcaggactggacgcgcaacacgttttataccgcctgttccacgaaacgccgccgcgcgtgttcgagccggaaacgtttgaattttcatgcacctgttcgcgcggcaaagtcagcgatatgctgttgatgctgggcggggaagaagtcggcggcgtggtggtggaacaaggcagcatcgaagtcgattgcgatttctgccacagcaaatatgtgtttgacgaaaccgatgtcaacgcgctgttcggggaggatgtggtcggcgttgccaaagggctgccccggcataccgtccaa

SEQ ID NO: 174 - protein, 302 aa, Neisseria meningitidis (group B)
MNQTAINRADVRTRFIFDDMPVRGLHVRLENVWQHIVKQKNYPAAIRRALGELLAAGVLLSGNLKNEGTLIVQVQGRGRLKMLVAEAASDRTVRATARWDETAEIADDESLGDLLGEGGVFVLTLQPKDGEPWQGVVPLEGGGIAQMLVNYMKRSEQLDTHIVLSASDEAAGGLLVQRLPEEVLDEEAWEHVSTLARTLTAEELAGLDAQHVLYRLFHETPPRVFEPETFEFSCTCSRGKVSDMLLMLGGEEVGGVVVEQGSIEVDCDFCHSKYVFDETDVNALFGEDVVGVAKGLPRHTVQ

SEQ ID NO: 175 - DNA, 840 bp, Neisseria meningitidis (group B)
  CDS (1)..(840): NMB1926
atgcaaaaccatgttatcagcttagcttccgccgcagaacgcagggcgcacattgccgcaaccttcggcgtgcgcggcatcccgtttcagtttttcgacgcactgatgccgtctgaagaactgaatcggatgatggcggaattggtgccgggattggcaaaacagcacctgttgagcgaagtggaaaaagcctgctttatgagccacgccgtattgtggaaacaggcattggatgaaggtctgccctatgttgccgtatttgaggatgatgtcctgcttggcaaagacgcagaaaagttccttgccgaagatacttggttggaagagcgttttgataaggattctgcctttatcgttcgtttggaaacgatgtttgcgaaagttattgtcagaccggataaagtcctgaattatgagaatcggtcatttcctttgctggagagcgaacattgggggacggctggctatatcatttcgcgtgaggcgatgcggtttttcttggaaaggtttgccgttttgccggcagagtggattaaagcggtagattggatgatgtttacttatttctttgataaggaggggatgcctgtttatcaggttaatcccgccttatgtacccaagaattgcattatgccaagttcctcagtaaaaacagtatgttgggtagcgatttggaaaaagatagggaacaagaaagaagacaccgccgttcgttgaaggtgatgtttgacttgaagcgtgctttgggtaaattcggtagggaaaagaagaaaagaatggagcgtcaaaggcaggcggagcttgagaaagcttacggcaggcgggtcatatcgttcaaa

SEQ ID NO: 176 - protein, 280 aa, Neisseria meningitidis (group B)
MQNHVISLASAAERRAHIAATFGVRGIPFQFFDALMPSEELNRMMAELVPGLAKQHLLSEVEKACFMSHAVLWKQALDEGLPYVAVFEDDVLLGKDAEKFLAEDTWLEERFDKDSAFIVRLETMFAKVIVRPDKVLNYENRSFPLLESEHWGTAGYIISREAMRFFLERFAVLPAEWIKAVDWMMFTYFFDKEGMPVYQVNPALCTQELHYAKFLSKNSMLGSDLEKDREQERRHRRSLKVMFDLKRALGKFGREKKKRMERQRQAELEKAYGRRVISFK

SEQ ID NO: 177 - DNA, 921 bp, Neisseria meningitidis (group B)
  CDS (1)..(921): NMB0017
atgctgcaaagaactttggcgaaatccatcagcgttaccggcgtcgggctgcattcgggcgaacgcgtcgcgctgaccctgcaccccgcgcctgaaaacagcgggatttccttccgccgtaccgatttggacggcgagatgggcgaacaaatcaagctgaccccttatttgatcaacgatacccgcctttcctccaccatcgttaccgacaaaggcgtgcgcgtcggcacgatcgaacacattatgtccgcgctgtccgcctacggcatcgacaatgcgctgattgagctgaacgcgcccgaaatcccgattatggacggctccagcctgccgtttatttaccttttgcaagatgcgggcgtggtcgatcaaaaggcgcaaaagcgttttttgaaaatcctcaagcctgtcgaaatcaaagaagcgggcaaatgggtgcgctttacgccgtatgacggctttaaggtaacgctgaccatcgaattcgaccatccggttttcaaccgcagctcgcccacttttgaaatcgatttcgccggcaaatcctacatcgacgaaatcgcgcgcgcgcgcactttcggctttatgcacgaagtggaaatgatgcgcgcccacaatctgggtttgggcggcaatttgaacaacgccatcgtgattgacgacacggatgtcctgaatcctgaaggcttgcgctatcccgatgagtttgtgcgccacaaaatccttgatgccatcggtgatttgtatatcgtcggacatccgattgtcggcgcatttgaaggctacaaatcgggacacgccatcaacaacgcactcttgcgcgcggttttggcagacgaaacggcttacgaccgggtggaatttgccgacagcgatgatttgcccgacgcatttcacgagctgaacatcagaacttgtgga

SEQ ID NO: 178 - protein, 307 aa, Neisseria meningitidis (group B)
MLQRTLAKSISVTGVGLHSGERVALTLHPAPENSGISFRRTDLDGEMGEQIKLTPYLINDTRLSSTIVTDKGVRVGTIEHIMSALSAYGIDNALIELNAPEIPIMDGSSLPFIYLLQDAGVVDQKAQKRFLKILKPVEIKEAGKWVRFTPYDGFKVTLTIEFDHPVFNRSSPTFEIDFAGKSYIDEIARARTFGFMHEVEMMRAHNLGLGGNLNNAIVIDDTDVLNPEGLRYPDEFVRHKILDAIGDLYIVGHPIVGAFEGYKSGHAINNALLRAVLADETAYDRVEFADSDDLPDAFHELNIRTCG

SEQ ID NO: 179 - DNA, 939 bp, Neisseria meningitidis (group B)
  CDS (1)..(939): NMB0935
atgccgaccccgaaagcctttgccctgctcgggccgaccgccggaggcaaaaccgcgctcgccctcaaaattgccgaaaccctgcctgtcgaaatcatcagcctcgattccgcgctggtttaccgcgatatggacatcggcacggcgaaaccgtccgcctccgaacgcgcctttgtcccgcaccaccttatcgacatcatcccgcctaccgaatcatacagcgccgcccgctttgtcgaagactgcacgcgcttggtcggggaaatttcctcacgcggcaggtttgcccttattgtcggcggcacgatgatgtatttccgcgccctgacccaaggtttgaacgatttgcccgaagccgacgcctgcctgcgtgccgacttggacgaacaaaaacagatgtacggcttggatttcctctaccgcaccctgcaaaaagtcgaccctgaaaccgcatgccgtctgaaaccgaacgacagccagcgtatcggacgcgctttggaagtttattatttaaccggcaaaccgatgagcacacatctcggcagcctgacctcccatacgctcccttttgatttgcataccgccgccctgattcccgaaaaccgtgcccgcctgcatgaaaacatcgccctgcgtttccacctgatgcttgaacagggctttatcggcgaagtagaaaacctgcgccgccgctatcccggcctgaccgcctactcccccgccatccgctgcgtcggctaccgtcaggcatggaaatatctggatggaaaaaccgatttcccggcatttgtcgagaaaggcattgccgccacccgccaacttgccaaacgccaactgacttggttgcgcaaaacacctttagactgcgttgccgacccgttttcagactgcacttcatgcacacgcctgattgaggcggcaaaacggtttttcggcgca

SEQ ID NO: 180 - protein, 313 aa, Neisseria meningitidis (group B)
MPTPKAFALLGPTAGGKTALALKIAETLPVEIISLDSALVYRDMDIGTAKPSASERAFVPHHLIDIIPPTESYSAARFVEDCTRLVGEISSRGRFALIVGGTMMYFRALTQGLNDLPEADACLRADLDEQKQMYGLDFLYRTLQKVDPETACRLKPNDSQRIGRALEVYYLTGKPMSTHLGSLTSHTLPFDLHTAALIPENRARLHENIALRFHLMLEQGFIGEVENLRRRYPGLTAYSPAIRCVGYRQAWKYLDGKTDFPAFVEKGIAATRQLAKRQLTWLRKTPLDCVADPFSDCTSCTRLIEAAKRFFGA

SEQ ID NO: 181 - DNA, 933 bp, Neisseria meningitidis (group B)
  CDS (1)..(933): proline iminopeptidase
atgtatgagataaaacagccttttcatagcggatacttgcaggtgtctgaaattcatcaaatttattgggaggaatcgggcaatcccgacggtgtgccggttatttttttacatggcgggccgggcgcgggggcttcgcctgaatgtcggggttttttcaatcccgatgtgttccgcatcgtcatcatcgaccagcgcggttgcggacgttcgcgcccgtatgcttgtgcggaagacaatacgacttgggatttggtggcggatattgaaaaagtccgtgaaatgctgggtatcgggaaatggctggtgttcggcggttcgtggggcagcactttgtcgctggcttatgcccaaacccatcctgaacgggtaaagggattggtgttgcgcgggatatttttgtgcaggccgtctgaaacggtgtggctgaacgaggcgggcggtgtgagccggatttatccggaacaatggcaaaaatttgtcgcgccgattgctgaaaatcggcggaaccggctgattgaggcgtatcacggattgctgtttcatcaagatgaagaagtgtgcctgtctgccgcgaaggcttgggcggattgggaaagctatctgatccgtttcgagccggaggaagtggatgaagatgcttatgcctcgctggcaatcgcgcgtttggaaaaccattattttgtcaacggcggttggttgcagggcgatagggcgattttgaacaatatcggcaaaatacggcatatcccgactattatcgtacaggggcggtatgatttgtgtacgccgatgcagagtgcgtgggcgctgtcgaaagcctttcccgaagcggaattgagggtggttcaggcagggcatcgtgcgttcgatccgcctttggtggatgcgttggttcaggcagttgaggatattttgccccatttgttgtaa

SEQ ID NO: 182 - protein, 310 aa, Neisseria meningitidis (group B)
MYEIKQPFHSGYLQVSEIHQIYWEESGNPDGVPVIFLHGGPGAGASPECRGFFNPDVFRIVIIDQRGCGRSRPYACAEDNTTWDLVADIEKVREMLGIGKWLVFGGSWGSTLSLAYAQTHPERVKGLVLRGIFLCRPSETVWLNEAGGVSRIYPEQWQKFVAPIAENRRNRLIEAYHGLLFHQDEEVCLSAAKAWADWESYLIRFEPEEVDEDAYASLAIARLENHYFVNGGWLQGDRAILNNIGKIRHIPTIIVQGRYDLCTPMQSAWALSKAFPEAELRVVQAGHRAFDPPLVDALVQAVEDILPHLL

SEQ ID NO: 183 - DNA, 897 bp, Neisseria meningitidis (group B)
  CDS (1)..(897): recombination associated protein
atgtggttcaagcagattagtttttatccgctcaacaaagaaaagctgcctgaggcagacgtacttgccgacaaacttgctgaagctgaatttacccattgccaaggcttagactggttcagcgaaggctttaccgcaccggtttcattctcccctgaactcgttttccctgccgactttaccttgcgcgtcgccctgaaaaaagaagaaaaagtcctgcctgccggcgtcatccgcgatattttggaagagaaggtagcggaaatccaaaacaatgaagcccgcaatgtcggccgtaaagaaaaacaagagcttaaagagcaaattacagacgacctgctgccccgagcgtttacccgcagcagccgtacagaagcggtgtttaacacccgccacggctacctgctcgtcaataacgcggcttccgccaaagcagaaaacatcctgaccaagctgcgcgaagctttgggcggtttggaagcctcgctgccgaataccaagcaatcgccctcttccttgatgaccggctggctgttgcaagggcattgcgaaggcggttttgaattagacagcgattgcgaactcaaaggtacgggcgatattgttcccgtcgtcaaagtatccaaacaagatttaaccgccgacgaagtggttcaacacgtcaaaaacggtaaaaccgttacccaactgggcttggtgtggcgcgaacaaattgcctttatcctcactcaagacttcacactcaagcgcatccaatacctcgacgtattgcaggaagaagccgaaagcaacggcgacgatgccgccggccttgccttcgcctcgcaaattctgatggcggaatccgtcagcaccatgttggaagaactggtttcctatttgggcggctggcaagat

SEQ ID NO: 184 - protein, 299 aa, Neisseria meningitidis (group B)
MWFKQISFYPLNKEKLPEADVLADKLAEAEFTHCQGLDWFSEGFTAPVSFSPELVFPADFTLRVALKKEEKVLPAGVIRDILEEKVAEIQNNEARNVGRKEKQELKEQITDDLLPRAFTRSSRTEAVFNTRHGYLLVNNAASAKAENILTKLREALGGLEASLPNTKQSPSSLMTGWLLQGHCEGGFELDSDCELKGTGDIVPVVKVSKQDLTADEVVQHVKNGKTVTQLGLVWREQIAFILTQDFTLKRIQYLDVLQEEAESNGDDAAGLAFASQILMAESVSTMLEELVSYLGGWQD

SEQ ID NO: 185 - DNA, 864 bp, Neisseria meningitidis (group B)
  CDS (1)..(864): NMB0062
atgaaaggcatcatactggcaggcggcagcggcacgcgcctctaccccatcacgcgcggcgtatccaaacagctcctgcccgtgtacgacaaaccgatgatttattaccccttgtcggttttgatgctggcgggaatccgcgatattttggtgattaccgcgcctgaagacaacgcctctttcaaacgcctgcttggcgacggcagcgatttcggcatttccatcagttatgccgtgcaacccagtccggacggcttggcacaggcatttatcatcggcgaagaatttatcggcaacgacaatgtttgcttggttttgggcgacaatattttttacggtcagtcgtttacgcaaacattgaaacaggcggcagcgcaaacgcacggcgcaaccgtgtttgcttatcaggtcaaaaaccccgaacgtttcggcgtggttgaatttaacgaaaacttccgcgccgtttccatcgaagaaaaaccgcaacggcccaaatccgattgggcggtaaccggcttgtatttctacgacaaccgcgccgtcgagttcgccaaacagctcaaaccgtccgcacgcggcgaattggaaattaccgacctcaaccggatgtatttggaagacggctcgctctccgttcaaatattgggacgcggtttcgcgtggctggacaccggcacccacgagagcctgcacgaagccgcttcattcgtccaaaccgtgcaaaatatccaaaacctgcacatcgcctgcctcgaagaaatcgcttggcgcaacggttggctttccgatgaaaaactggaagaattggcgcgcccgatggcgaaaaaccaatacggccaatatttgctgcgcctgttgaaaaaa

SEQ ID NO: 186 - protein, 288 aa, Neisseria meningitidis (group B)
MKGIILAGGSGTRLYPITRGVSKQLLPVYDKPMIYYPLSVLMLAGIRDILVITAPEDNASFKRLLGDGSDFGISISYAVQPSPDGLAQAFIIGEEFIGNDNVCLVLGDNIFYGQSFTQTLKQAAAQTHGATVFAYQVKNPERFGVVEFNENFRAVSIEEKPQRPKSDWAVTGLYFYDNRAVEFAKQLKPSARGELEITDLNRMYLEDGSLSVQILGRGFAWLDTGTHESLHEAASFVQTVQNIQNLHIACLEEIAWRNGWLSDEKLEELARPMAKNQYGQYLLRLLKK

SEQ ID NO: 187 - DNA, 924 bp, Neisseria meningitidis (group B)
  CDS (1)..(924): NMB1374
atgaatacaggcaaaccccaaaaacgtgccgtcaacggtgttttgctcttggacaaacccgaaggcctttccagcaacaccgcgctgcaaaaagcgcggcgtttgtttcatgccgaaaaagccggacataccggcgtgctcgaccctttggcaaccggacttttgcccgtctgcttcggtgaagcgaccaagttcgcccaatacctgctggatgccgacaaagcctacaccgccacgctgaaactcggcgaagccagcagcacgggtgatgccgaaggcgaaatcattgccaccgcccgcgccgatatttccttagccgaatttcagacggcctgccaagcactgacaggcaacatccgccaagtgccgccaatgttttccgcgctcaagcacgaaggcaaaccgctgtacgaatacgcccgcaaaggcatcgtcatcgaacgcaaagcgcgctacattaccgtttacgccatcgatattgccgaatttgacgcgcccaaagccgtcatcgacgtacgttgcagcaaaggcacctacatccgcaccctcagcgaagacatcgccaaacacatcggcacgttcgcccacctgaccgccctgcgccgcactgaaaccgccggctttaccatcgcccaaagccacacgcttgaggccttggcaaatttgaacgaaacagaacgcgacagcttgctgctaccctgcgacgtattggtttcacactttccccaaaccgttttaaacgattatgccgtccatatgctccactgcggacaacgtccgcgtttcgaagaagacctgccttccgacacgccggtacgcgtttacacggaaaacggccgctttgtcggtctggcggaatatcaaaaagaaatatgccgtctgaaagccttgcgcctgatgaacacggcggcatccgccgcctga

SEQ ID NO: 188 - protein, 307 aa, Neisseria meningitidis (group B)
MNTGKPQKRAVNGVLLLDKPEGLSSNTALQKARRLFHAEKAGHTGVLDPLATGLLPVCFGEATKFAQYLLDADKAYTATLKLGEASSTGDAEGEIIATARADISLAEFQTACQALTGNIRQVPPMFSALKHEGKPLYEYARKGIVIERKARYITVYAIDIAEFDAPKAVIDVRCSKGTYIRTLSEDIAKHIGTFAHLTALRRTETAGFTIAQSHTLEALANLNETERDSLLLPCDVLVSHFPQTVLNDYAVHMLHCGQRPRFEEDLPSDTPVRVYTENGRFVGLAEYQKEICRLKALRLMNTAASAA

SEQ ID NO: 189 - DNA, 909 bp, Neisseria meningitidis (group B)
  CDS (1)..(909): NMB1655
atggttcatattatgtttaatcaggcagcacaagaattgacgactatccgcgatattttacgttttgcagtcagccgttttaatgaggcagggctcttttttggtcatggaacagataatgcgcatgatgaagcagcttatttgattctgcatactttgaatttgcctttggatatgcttgccccatatcttgatgcaaaactcttggaagctgaaaaagaggaagtgctggcggttattgagcgtcgtgctgtcgaacacattccagccgcttatttgacacaccaggcatggcagggagagtttgatttctatgtggatgagcgcgtaatcatacctcgttcttttatttatgaattgttgggtgacggacttcgtccttggatagaatacgatgagttggtgcataatgctttggatctttgcaccggaagcggttgccttgccattcagatggcgcatcattatcctgatgcccaaattgatgcggttgatgtgagcttggatgctttggaagtggcagggattaatgtcgaagattatggtttggaagaacgcatccggcttattcatacggatttgtttgaaggattggaaggcacttatgatttgattgtttccaatcctccttatgtggatgcggaatcggttgagttattgcctgaagagtatttgcacgaaccggaattggcattgggcagcggggcggacgggttggatgccaccaggcagattcttctgaatgcggcaaagtttctgaatcccaaaggtgtattgctggtggaaatcgggcataacagggatgtattggaagcagcgtatccggagttgccttttacttggttggaaaccagcgggggcgacggttttgttttcctcttgacgcgcgagcagttattgggtgaagag

SEQ ID NO: 190 - protein, 303 aa, Neisseria meningitidis (group B)
MVHIMFNQAAQELTTIRDILRFAVSRFNEAGLFFGHGTDNAHDEAAYLILHTLNLPLDMLAPYLDAKLLEAEKEEVLAVIERRAVEHIPAAYLTHQAWQGEFDFYVDERVIIPRSFIYELLGDGLRPWIEYDELVHNALDLCTGSGCLAIQMAHHYPDAQIDAVDVSLDALEVAGINVEDYGLEERIRLIHTDLFEGLEGTYDLIVSNPPYVDAESVELLPEEYLHEPELALGSGADGLDATRQILLNAAKFLNPKGVLLVEIGHNRDVLEAAYPELPFTWLETSGGDGFVFLLTREQLLGEE

SEQ ID NO: 191 - DNA, 1926 bp, Neisseria meningitidis (group B)
  CDS (1)..(1926): NMB0554
atggcaaaagtaatcggtatcgacttaggtacaaccaactcttgtttggccatttccgaaaacggtcaaaccaaagtgatcgaaaacgcagaaggcgcacgcaccacgccgtccgttatcgcttatttggacggcggcgaaatcctcgtcggtgcgcctgccaaacgccaagcggtaaccaacgccaaaaacactatttacgccgccaaacgtttgatcggccacaaatttgaagacaaagaagtccaacgcgacatcgaatctatgcctttcgaaatcatcaaagccaacaacggcgacgcatgggtaaaagcacaaggcaaagagctgtctcctcctcaaatttccgcagaagtcctgcgtaaaatgaaagaagccgccgaagcttacttgggcgaaaaagtaaccgaagccgtgattaccgtccctgcctacttcaacgacagccaacgtcaagccaccaaagacgcaggccgtatcgccggtttggacgtgaaacgcatcatcaacgagccgaccgcagccgctttggcattcggtatggacaaaggcgacaacaaagaccgcaaagtagccgtatatgacttgggcggcggtactttcgatatttccatcatcgaaatcgccaacctcgacggcgacaaacaattcgaagtattggcaaccaacggcgataccttcttgggcggtgaagacttcgaccaacgcctcatcgaccacatcatcgccgagttcaaaaaagaacaaggcattgatttgaaacaagacgtgatggctctacaacgcctgaaagaagctgccgaaaaagccaaaatcgaattgtccagcggccagcaaaccgaaattaacctgccgtacatcaccatggacgcaaccggcccgaaacacttggcgatgaaaattacccgcgccaaattcgaaagcctggttgaagacctgattacccgctctatcgaaccttgcaaaattgcattgaaagatgccggcttgagcaccggcgacatcgacgacgtaatcttggtcggcgggcagtcccgtatgccgaaagtacaagaagccgttaaagccttcttcggcaaagaaccgcgcaaagacgtgaaccctgacgaagccgttgccgtaggcgcagcgatccaaggcgaagtattgagcggcggccgcagcgacgtattgctactggacgtaactcctctgtctttgggtatcgaaaccatgggcggcgtgatgaccaaactgattcagaagaacaccaccatcccgaccaaagcgtcgcaagtgttctctaccgccgaagacaaccaaagcgcagtaaccatccacgtactgcaaggcgaacgcgaacgcgcttctgccaacaaatctttgggtcagttcaacttgggcgacatcgcacctgcaccgcgcggtatgccgcaaatcgaagtaaccttcgacatcgacgccaacggcatcctgcacgtttccgccaaagacaaaggcaccggtaaagcagccaacatcaccatccaaggttcttcaggtttgagcgaagaagaaatcgaacgcatggtgaaagatgccgaagccaatgccgaggaagataaaaaactgactgaattggtcgcttcccgcaaccaagccgaagccctgattcactctgtgaaaaaatctttggccgactacggcgacaaactcgacgcagccgagaaagaaaaaatcgaagccgcgctgaaagaagccgaagaagcagttaaaggcgacgacaaagccgctatcgatgccaaaaccgaggcgctgggcgcagccagccaaaaactgggggaaatggtttacgctcaagcacaagctgaagcccaagcaggcgaaagcgaacaagccaatgcttctgcaaagaaagacgatgatgtcgtagatgccgactttgaagaagtaaaagacgacaaaaaa

SEQ ID NO: 192 - protein, 642 aa, Neisseria meningitidis (group B)
MAKVIGIDLGTTNSCLAISENGQTKVIENAEGARTTPSVIAYLDGGEILVGAPAKRQAVTNAKNTIYAAKRLIGHKFEDKEVQRDIESMPFEIIKANNGDAWVKAQGKELSPPQISAEVLRKMKEAAEAYLGEKVTEAVITVPAYFNDSQRQATKDAGRIAGLDVKRIINEPTAAALAFGMDKGDNKDRKVAVYDLGGGTFDISIIEIANLDGDKQFEVLATNGDTFLGGEDFDQRLIDHIIAEFKKEQGIDLKQDVMALQRLKEAAEKAKIELSSGQQTEINLPYITMDATGPKHLAMKITRAKFESLVEDLITRSIEPCKIALKDAGLSTGDIDDVILVGGQSRMPKVQEAVKAFFGKEPRKDVNPDEAVAVGAAIQGEVLSGGRSDVLLLDVTPLSLGIETMGGVMTKLIQKNTTIPTKASQVFSTAEDNQSAVTIHVLQGERERASANKSLGQFNLGDIAPAPRGMPQIEVTFDIDANGILHVSAKDKGTGKAANITIQGSSGLSEEEIERMVKDAEANAEEDKKLTELVASRNQAEALIHSVKKSLADYGDKLDAAEKEKIEAALKEAEEAVKGDDKAAIDAKTEALGAASQKLGEMVYAQAQAEAQAGESEQANASAKKDDDVVDADFEEVKDDKK

SEQ ID NO: 193 - DNA, 1311 bp, Neisseria meningitidis (group B)
  CDS (1)..(1311): NMB1876
atgagcgcgcccgacctctttgtcgcccacttccgcgaagccgtcccctacatccgccaaatgcgcggcaaaacgctggtcgccggcatagacgaccgcctgctcgaaggtgataccttaaacaagctcgccgccgacatcgggctgttgtcgcaactgggcatcaggctcgtcctcatccacggcgcgcgccacttcctcgaccgccacgccgccgctcaaggccgcacgccgcattattgccggggcttgcgcgttaccgacgaaacctcgctcgaacaggcgcagcagtttgccggcaccgtccgcagccgttttgaagccgcattgtgcggcagcgtttccgggttcgcgcgcgcgccttccgtcccgctcgtatcgggcaacttcctgaccgcccgtccgataggtgtgattgacggaaccgatatggaatacgcgggcgttatccgcaaaaccgacaccgccgccctccgtttccaactcgacgcgggcaatatcgtctggctgccgccgctcggacattcctacagcggcaagaccttctatctcgatatgcttcaaaccgccgcctccgccgccgtctcgcttcaggccgaaaaactcgtttacctgaccctttcagacggcatttcccgccccgacggcacgctcgccgaaaccctctcggcacaggaagcgcaatcgctggcggaacacgccggcggcgaaacgcgacggctgatttcgtccgccgttgccgcgctcgaaggcggcgtgcatcgcgtccaaatcctcaacggagccgccgacggcagcctgctgcaagaactcttcacccgcaacggcatcggcacgtccattgccaaagaagccttcgtctccatccggcaggcgcacagcggcgacatcccgcacatcgccgccctcatccgcccgctggaagaacagggcatcctgctgcaccgcagccgcgaatacctcgaaaaccacatttccgaattttccatcctcgaacacgacggcaacctgtacggttgcgccgccctgaaaacctttgccgaagccgattgcggcgaaatcgcctgccttgccgtctcgccgcaggcacaggacggcggctacggcgaacgcctgcttgcccacattatcgataaggcgcgcggcataggcataagcaggctgttcgcactgtccacaaataccggcgaatggtttgccgaacgcggctttcagacggcatcggaagacgagttgcccgaaacgcggcgcaaagactaccgcagcaacggacggaactcgcatattctggtacgtcgcctgcaccgctga

SEQ ID NO: 194 - protein, 436 aa, Neisseria meningitidis (group B)
MSAPDLFVAHFREAVPYIRQMRGKTLVAGIDDRLLEGDTLNKLAADIGLLSQLGIRLVLIHGARHFLDRHAAAQGRTPHYCRGLRVTDETSLEQAQQFAGTVRSRFEAALCGSVSGFARAPSVPLVSGNFLTARPIGVIDGTDMEYAGVIRKTDTAALRFQLDAGNIVWLPPLGHSYSGKTFYLDMLQTAASAAVSLQAEKLVYLTLSDGISRPDGTLAETLSAQEAQSLAEHAGGETRRLISSAVAALEGGVHRVQILNGAADGSLLQELFTRNGIGTSIAKEAFVSIRQAHSGDIPHIAALIRPLEEQGILLHRSREYLENHISEFSILEHDGNLYGCAALKTFAEADCGEIACLAVSPQAQDGGYGERLLAHIIDKARGIGISRLFALSTNTGEWFAERGFQTASEDELPETRRKDYRSNGRNSHILVRRLHR

SEQ ID NO: 195 - DNA, 1813 bp, Neisseria meningitidis (group B)
  CDS (1)..(1812): DNA primase
atgattccatccgacttcattgacgagcttttagccaaaaccgatattgtcgatattatcgacgagcaggttccgctgaaaaaaggcggggcgaactatatggcgtgttgcccgttccacaaggaaaaaacgccgtcgttttcggtcagtccaaccaagcagttttaccattgtttcagttgcggggcacacggctcagcgattggttttgtgatggaacatcagggactgtcgtttccggaggcggttcagttccttgccgaccgcgtgggtatggtcgtgccgaaagtgcacgggcaaaacgataatcccgaagtccgtgccgaacgtaagaaaaaacagcagacactggaggaaacgacggctgcggcagctgatttttacgcgcaacagctaaaattcaatccagcggcaaaagcttatttggacaagcgcggcttgagtgcagaagttatcgcgcattatggtttgggctatgcgcccgacggctggcagcctttgacgcaagtgttccaaccgtatcctaataccgcgttagtggatacggggatggtgattgacaatgagggacggcattacgaccgcttccgccatcggattatgttccccatccgcaatccgcgcgggcaggttatcggtttcggcggcagggtgctggacgactcgaagccgaaatatttaaattctcccgatacgcctttgttcgataaggggaaaaacctttacggactgtatgaagggcgtgccgctgtcaaggaagcggggcggattttggtggtcgaaggctatatggacgtggtcgcgctggcacagttcggcgtgggctacggcgtggcggctttgggtacggcgacgacggcggaacacgtcaaaatcctgatgcgtcaggcagacagtatttatttctgtttcgacggcgacagcgcggggcgaaaagcggcttggcgcgcgctggaaaacgcgctgccgcagttgaaggacgacaaatcgctgcattttttgttcctgccggaagaacacgaccccgacagctacatccgcgcctacggcaaagcgcaatttgaagacgcgcttctgaatcaaagcaagcctttgtcggagtatttctgggaacacctttcagacggcattcatctcaatacgcaggaaggcaaggcggaattggtaaaaaccagttcgccgcttttggcgcagattaccgcgccggcattggcttatttgttaaaacaacggcttagcgagctggtcggcatcgaccccgacaacctcgcgcaactgctaggacaggaagcgccgaagcggcacgtcaaacaaaaaaactacaaactgcctccgatttccgtcaaacagcccgtcatgctgacgctggtacagcggcaaatccgcagcctcttgataaatccggattgggctgcatatatagacctgcccgattatctggcgttggacggtgatttcgcctgccttgccaatcttgccgaatcgattaaaaaccatgccgccgtacccgaaaccgctcaggttttagagtatatgcgcggctcgccttacgaagaaacgataacccgaatcttccattcaacgcaccaatcggaagaaatgaacagcagcagtgaagaagattgcgagaatttccaaatcggcatgaaaaaactgctcaatgagttaaaatacagccaaatcgaaacattaaaacaaaaaagcctgcaatccggcttaaatgaaagcgagaaaaaacttttgctgtcgctgctgaccgcaaaacaaaattgaccggcggattccgccatccgtaaaccgttatgccgtctga

SEQ ID NO: 196 - protein, 590 aa, Neisseria meningitidis (group B)
MIPSDFIDELLAKTDIVDIIDEQVPLKKGGANYMACCPFHKEKTPSFSVSPTKQFYHCFSCGAHGSAIGFVMEHQGLSFPEAVQFLADRVGMVVPKVHGQNDNPEVRAERKKKQQTLEETTAAAADFYAQQLKFNPAAKAYLDKRGLSAEVIAHYGLGYAPDGWQPLTQVFQPYPNTALVDTGMVIDNEGRHYDRFRHRIMFPIRNPRGQVIGFGGRVLDDSKPKYLNSPDTPLFDKGKNLYGLYEGRAAVKEAGRILVVEGYMDVVALAQFGVGYGVAALGTATTAEHVKILMRQADSIYFCFDGDSAGRKAAWRALENALPQLKDDKSLHFLFLPEEHDPDSYIRAYGKAQFEDALLNQSKPLSEYFWEHLSDGIHLNTQEGKAELVKTSSPLLAQITAPALAYLLKQRLSELVGIDPDNLAQLLGQEAPKRHVKQKNYKLPPISVKQPVMLTLVQRQIRSLLINPDWAAYIDLPDYLALDGDFACLANLAESIKNHAAVPETAQVLEYMRGSPYEETITRIFHSTHQSEEMNSSSEEDCENFQIGMKKLLNELKYSQIETLKQKSLQSGLNESEKKLLLSLLTAKQN

SEQ ID NO: 197 - protein, 13 aa, Neisseria meningitidis (group B)
PADSAIRKPLCRL

SEQ ID NO: 198 - DNA, 1686 bp, Neisseria meningitidis (group B)
  CDS (1)..(1686): glutaminyl tRNA synthetase
atgctcaataaagaccaatttgcggacaaccattttatccgcaccatcatcgaagaagacctcgaaagcggcaaacatacagctgtccaaacccgtttcccgcccgaacccaacggctacctgcacatcggacacgccaaatccatctgcctgaacttcggtttggcgtatatttacgacggcttgtgcaacctgcgttttgacgataccaaccccgaaaaagaaaacgacgaatacgtcaacgccatcaaagaagatgtcgagtggctcggtttccattgggcgggcgagccgcgtttcgcttccaactatttcgaccagctttatgactacgccgtcggtttgattaaagacggcaaagcgtatgtcgatgatttgacgcccgaagaaatgcgcgaataccgcggtacgctgaccgaagcgggtaaaaacagcccttaccgcgaccgcagcgtcgaagaaaacctcgacctgttcacacgcatgaaaaacggcgagttccccgacggcagcaaaaccctgcgcctgaaaatcgacatggcatcgggcaacatcaatatgcgcgaccccgtcatctaccgcatccgccgcgcccatcaccacaacaccggcgacaaatggtgtatctacccgatgtacgactacacgcattgcatctccgatgccatcgaaggcatcacgcattccttgtgtacgctcgaattcgaagcacaccgtccgctgtacgactgtgtgttggacaacattcctgcgccgcatgccacccgtccgcgccaatacgagttttcccgtttggagcttttgtacaccattacctccaaacggaaattgaatcagttggttgtggaaaaacacgtttccggctgggacgatccgcgtatgccgaccatttccggtatgcgccgacgcggctacacgcccgaagggctgcgcctgtttgccaaacgcgccggtatttccaaatctgaaaacatcgtcgatatgagcgtgttggaaggcgcgattcgcgaagagttggaaaattccgccccacgcctgatggcggtgttgaacccgctcaaagtgaccctgaccaactttgaaaccggcagaacccaaagccgccgtgccgcgttccatccgaaccacgaggaaatgggcgagcgcgaagtacctatttcccaaaccatctatattgaagccgacgactttgccgaaaatccgcccaaaggcttcaaacgcctgattcccggcggcgaagtacgcttgcgccacggctatgtcatcaagtgcgatgaagtcgtcaaagacgaagcaggcaatgtggttgaactcaaatgcagcatcgaccacgacaccttgggcaaaaatccagaaggccgtaaagttaaaggcgtgattcattgggtttccgccgaacacgccgccgaaatcaaagtccgtctgtacgaccgcctctttaccgtcgagcgtcccgatgccgtgcgcggcgaagacggcgaatacctgccgttcaccgatttcctcaatccggaatccgtcaaggaaatcaccgcctacgccgaacctgccgccaaagatttgccggcagaaagccgttggcagttcgagcgtatcggctacttcgtaaccgaccgtaaagaccacggcaaagacacgccggtgtttaaccgcacggtaacgctgaaagactcttggcagcctaag

SEQ ID NO: 199 - protein, 562 aa, Neisseria meningitidis (group B)
MLNKDQFADNHFIRTIIEEDLESGKHTAVQTRFPPEPNGYLHIGHAKSICLNFGLAYIYDGLCNLRFDDTNPEKENDEYVNAIKEDVEWLGFHWAGEPRFASNYFDQLYDYAVGLIKDGKAYVDDLTPEEMREYRGTLTEAGKNSPYRDRSVEENLDLFTRMKNGEFPDGSKTLRLKIDMASGNINMRDPVIYRIRRAHHHNTGDKWCIYPMYDYTHCISDAIEGITHSLCTLEFEAHRPLYDCVLDNIPAPHATRPRQYEFSRLELLYTITSKRKLNQLVVEKHVSGWDDPRMPTISGMRRRGYTPEGLRLFAKRAGISKSENIVDMSVLEGAIREELENSAPRLMAVLNPLKVTLTNFETGRTQSRRAAFHPNHEEMGEREVPISQTIYIEADDFAENPPKGFKRLIPGGEVRLRHGYVIKCDEVVKDEAGNVVELKCSIDHDTLGKNPEGRKVKGVIHWVSAEHAAEIKVRLYDRLFTVERPDAVRGEDGEYLPFTDFLNPESVKEITAYAEPAAKDLPAESRWQFERIGYFVTDRKDHGKDTPVFNRTVTLKDSWQPK

1. A method for identifying an antigen comprising:
a. obtaining antibodies raised against a commensal Neisseria or an extract from a commensal Neisseria;
b. contacting the antibodies with one or more polypeptides obtained from an expression library of either a commensal bacteria or a pathogenic bacteria;
c. determining whether one or more polypeptides bind to one or more of said antibodies;
d. where a polypeptide bind to an antibody, identifying that polypeptide as an antigen; and
e. isolating a clone that expresses the antigen from the expression library.

2. A method according to claim 1, wherein step (e) comprises:
i. identifying the molecular weight of the polypeptide that bind to the antibody;
ii. correlating the molecular weight with the molecular weight of polypeptide encoded by the genome of the bacteria from which the polypeptide is derived; and
iii. determining an identity for the polypeptide and the corresponding nucleic acid that encodes the polypeptide.

3. A method according to claim 2, wherein the molecular weight of the polypeptide is determined via mass spectrometry, electrophoresis or chromatography.

4. A method according to claim 1, wherein the polypeptides of step (b) are presented in the form of a phage display library, and in step (e) the clone that expresses the polypeptide antigen is located within a phagemid vector.

5. A method according to claim 4, wherein the phage display library is in lamda phage.

6. A method according to claim 1, wherein the expression library is derived from a pathogenic bacterial genome.

7. A method according to claim 1, wherein the expression library is derived from a commensal bacterial genome.

8. A method according to claim 7, further comprising the steps of:
i. using the nucleic acid sequence of the isolated clone encoding the polypeptide antigen from the commensal bacteria to identify homologous sequences in pathogenic bacteria; and
ii. cloning the homologous sequences from the pathogenic bacteria in order to generate the equivalent pathogenic bacterial polypeptide antigen.

9. A method according to claim 1, wherein the commensal Neisseria is selected from the group consisting of N lactamica; N. cinerea; N. sicca; N. subflava; N. elogata; N. flavescens; N. perflava and N polysaccharea.

10. A method according to claim 1, wherein the pathogenic bacteria is selected from the Neisseriaceae/Pasteurellaceae family of Gram negative bacteria.

11. A method according to claim 10, wherein the pathogenic bacteria is N meningitidis.

12. A method according to claim 1, wherein the antibodies are raised against whole commensal Neisseria cells.

13. A method according to claim 1, wherein the antibodies are raised against a protein extract from commensal Neisseria cells.

14. A method according to claim 13, wherein the protein extract is an outer membrane protein extract.

15. A method according to claim 1, wherein the antibodies are purified so as to be enriched for IgG.

16. A method for identifying an antigen, suitable for inclusion in a vaccine composition, comprising the steps of:
a. obtaining sera raised against an outer membrane protein extract of N lactamica genome;
b. contacting the sera with a phage display library comprising the entire N. lactamica genome;
c. identifying a phage that tests positive for a binding interaction with the sera, and isolating the positive phage;
d. extracting phagemid vector from the positive phage and characterising the cloned N lactamica genomic sequence located therein; and
e. determining the polypeptide encoded by the N lactamica genomic sequence and identifying the polypeptide as an antigen.

17. A method according to claim 16, further comprising the step of:
f. comparing the sequence of the N. lactamica polypeptide antigen with a N. meningitidis genomic library in order to identify the N meningitidis homologue polypeptide antigen.

18. A method for identifying an antigen, suitable for inclusion in a vaccine composition, comprising the steps of:
a. obtaining sera raised against an outer membrane protein extract of N lactamica;
b. isolating the IgG component of the sera;
C. binding the isolated IgG to a solid phase;
d. contacting the bound IgG with polypeptides obtained from an extract of N meniningitidis cells;
e. isolating solid phase-IgG-polypeptide complexes that are formed by the binding of polypeptides to IgG;
f. analysing solid phase-IgG-polypeptide complexes via SELDI mass spectrometry;
g. correlating molecular weights obtained for the polypeptide from (f) with molecular weights of known and putative polypeptides from the N. meningitidis genome database; and
h. identifying as antigens those N meningitidis polypeptides encoded by genes determined from the correlated molecular weights of (g).

19. A method of preparing a vaccine consisting of the steps of identifying an antigen according to the method of claim 1, and combining the antigen with a pharmaceutically acceptable carrier.

20. A method for preparing a vaccine composition consisting of the steps of:
a. obtaining sera raised against a commensal bacteria, or an extract from a commensal Neisseria;
b. contacting the sera with one or more polypeptides obtained from either a commensal or a pathogenic bacteria;
c. determining whether the one or more polypeptides bind to antibodies present in the sera;
d. where a polypeptide binds to an antibody in the sera, identifying that polypeptide as an antigen; and
e. combining the antigen with a pharmaceutically acceptable carrier.

21. A method for preparing a vaccine composition consisting of the steps of:
a. obtaining sera raised against a commensal Neisseria , or an extract from a commensal Neisseria;
b. contacting the sera with one or more polypeptides obtained from either a commensal or a pathogenic bacteria;
c. determining whether the one or more polypeptides bind to antibodies present in the sera;
d. where a polypeptide binds to an antibody in the sera, identifying that polypeptide as an antigen;
e. obtaining the nucleic acid sequence that encodes the antigen; and
f. preparing a vaccine composition comprising the nucleic acid sequence and a pharmaceutically acceptable carrier.

22. (cancelled)

23. An antigen identified by the method of claim 1.

24. A polypeptide encoded by all or a part of a nucleic acid sequence selected from the group consisting of SEQ ID NOS: 1, 5, 11, 15, 19, 23, 27, 31, 35, 39, 43, 47, 51, 55, 59, 63, 67, 71, 75, 79, 83, 87, 91, 95, and 99.

25. A polypeptide antigen expressed from all or part of a nucleic acid sequence selected from the group consisting of SEQ ID NOS: 1, 5, 11, 15, 19, 23, 27, 31, 35, 39, 43, 47, 51, 55, 59, 63, 67, 71, 75, 79, 83, 87, 91, 95, and 99.

26. A polypeptide antigen expressed from a nucleic acid sequence having at least 90% homology with a nucleic acid sequence selected from the group consisting of SEQ ID NOS: 1, 5, 11, 15, 19, 23, 27, 31, 35, 39, 43, 47, 51, 55, 59, 63, 67, 71, 75, 79, 83, 87, 91, 95, and 99.

27. An isolated nucleic acid molecule selected from the group consisting of SEQ ID NOS: 1, 5, 11, 15, 19, 23, 27, 31, 35, 39, 43, 47, 51, 55, 59, 63, 67, 71, 75, 79, 83, 87, 91, 95, and99.

28. A vector comprising one or more nucleic acid sequences selected from the group consisting of SEQ ID NOS: 1, 5, 11, 15, 19, 23, 27, 31, 35, 39, 43, 47, 51, 55, 59, 63, 67, 71, 75, 79, 83, 87, 91, 95, and 99.

29. A polypeptide selected from the group consisting of SEQ ID NOS: 2, 6-8, 12, 16, 20, 24, 28, 32, 36, 40, 44, 48, 52, 56, 60, 64, 68, 72, 76, 80, 84, 88, 92 and 100.

30. A vaccine composition comprising:
a. apolypeptide expressed from all or part of a nucleic acid sequence selected from the group consisting of SEQ ID NOS: 1, 5, 11, 15, 19, 23, 27, 31, 35, 39, 43, 47, 51, 55, 59, 63, 67, 71, 75, 79, 83, 87, 91, 95, and 99; and
b. a pharmaceutically acceptable carrier.

31. A vaccine composition comprising:
a. apolypeptide expressed from all or part of a nucleic acid sequence selected from the group consisting of SEQ ID NOS: 3, 9, 13, 17, 21, 25, 29, 33, 37, 41, 45, 49, 53, 57, 61, 65, 69, 73, 77, 81, 85, 89, 93, 101, 103, 105, 107, 109, 111, 113, 115, 117, 119, 121, 123, 125, 127, 129, 131, 133, 135, 137, 139, 141, 145, 147, 149, 151, 153, 155, 157, 159, 161, 163, 165, 167, 169, 171, 173, 175, 177, 179, 181, 183, 185, 187, 189, 191, 193, 195, and 198; and
b. a pharmaceutically acceptable carrier.

32. A composition according to any one of claims 30 and 31, wherein the polypeptide is expressed from all or part of a nucleic acid sequence having at least 90% homology to one or more of the sequences recited in claim 33.

33. A vaccine composition comprising:
a. all or a part of a polypeptide selected from the group consisting of SEQ ID NOS: 2, 6-8, 12, 16, 20, 24, 28, 32, 36, 40, 44, 48, 52, 56, 60, 64, 68, 72, 76, 80, 84, 88, 92, and 100; and
b. a pharmaceutically acceptable carrier.

34. A vaccine composition comprising:
a. all or a part of a polypeptide selected from the group consisting of SEQ ID NOS: 4, 10, 14, 18, 22, 26, 30, 34, 38, 42, 46, 50, 54, 58, 62, 66, 70, 74, 78, 82, 86, 90, 94, 102, 104, 106, 108, 110, 112, 114, 116, 118, 120, 122, 124, 126, 128, 130, 132, 134, 136, 138, 140, 142-144, 146, 148, 150, 152, 154, 156, 158, 160, 162, 164, 166, 168, 170, 172, 174, 176, 178, 180, 182, 184, 186, 188, 190, 192, 194, 196-197, and 199, and
b. a pharmaceutically acceptable carrier.

35. (cancelled)

36. (cancelled)

37. (cancelled)

38. A method of preparing a composition for vaccination against infection by pathogenic bacteria, comprising:
a. obtaining a first antigen from a commensal Neisseria;
b. comparing (i) the amino acid sequence of the first antigen with the amino acid sequence of a second antigen from a pathogenic bacteria, or (ii) comparing the sequence of a nucleic acid which codes for the first antigen with the sequence of a nucleic acid that codes for the second antigen; and, if the first antigen is homologous to the second antigen or if the nucleic acid sequence for the first antigen is homologous to the nucleic acid sequence for the second antigen; and
c. preparing a composition for vaccination against bacterial infection comprising the first antigen.

39. A method according to claim 38, wherein the second antigen is derived from a library of antigens from a pathogenic bacteria or the nucleic acid sequence coding for the second antigen is derived from a library of nucleic acid sequences coding for antigens from a pathogenic bacteria.

40. A method according to claim 38, wherein the commensal nucleic acid sequence is compared with a genome sequence of a pathogenic Neisseria.

41. A vaccine composition according to claim 30, further comprising neisserial outer membrane vesicles (OMVs).

42. An antibody that binds to an antigen according to claim 23.

43. An antibody that binds to a polypeptide antigen of claim 24.

44. A pharmaceutical composition comprising an antibody of claim 42.

45. A method of preparing a vaccine consisting of the steps of identifying an antigen according to the method of claim 16, and combining the antigen with a pharmaceutically acceptable carrier.

46. A method of preparing a vaccine consisting of the steps of identifying an antigen according to the method of claim 18, and combining the antigen with a pharmaceutically acceptable carrier.

47. A composition according to any one of claims 30 and 31, wherein the polypeptide is expressed from all or part of a nucleic acid sequence having at least 90% homology to one or more of the sequences recited in claim 34.
